United States Patent Application Publication US 2026/0191916 A1 - sequence listing, part 54

SEQ ID NO: 249 - DNA, 1982231 bp, Bacteroides thetaiotaomicron
  source 1..1982231: mol_type = genomic DNA
gagaagagggtgaattcaatacttgaacttcaccctcttcttgaatcattagattagcgattaataggaactaccattcaattgcttgatcttcgtctggaatctgagtattgatatcacgtgataatgtcaatgtaccttttacatgatagcgaatgatggtaccttccactggtatataattgaaataataatcaacattattaattattacataacggtgttccagataaggcttcgcgtcatccattgatgaagaaatacgaaatgaaggagtcacgtccttgtttaattcaaatccaatctcttctgcattatcacaggaaatagtaaccgaaccattcgtctcaccattaaaagcaaatttgattttatactttctacggtctgtataatcctcatctactattcctgcatacgtaaaaatagtctgttcatctatcacataccctcttattgacgattttgtgatagattctgctgtttctatcggtttaccatctccatcatatcccgtcaccaccttgttggttattcctgtaccagaataatcgccagagtaatcattaaatgggaagattctcaatatcgccttagcatagtctttacgcggatgagctacgtagttgtaagacgcgtcgtctacaatctgcaatggaagtacccatttttctgacatatcaatgttgcgaaaatcaaatttaagatccagtaaacctttattttctccagcttttatctgtagagattctggatatgaagcgtatgccaatccttctgctcccatatcctcataatatagttctgtacgtgtagcgtaacgagcgtaattcaaaatattcaatgtatcagcatcatgtgctacgtgtacagtgacattacttggattatcggtagaaccactaacaagtatcggtaactgataattggacctcccttctcctccttctgcataatttccttctgcatcatggcggctataaggtacatatatattcgtcactcccttactatccagttgtgaactgaaagaaatgtagtgctcatattgttcatcttcccattccgaattgcaggaagttcccaacattgtcattgcagccaaagctgccaaagtatatattttcttcatatataagtctttatgtttagaattaatcatacattgtccatcctgggttctgtgttaaacgtgaattacgtttcaactcactatgtttgataggccataaccatagcttttccgagaaagtagacgggagattgtaaacaggaattgccgaatggaattcgtctctcttagcttcaccaacaaagacattacaaccgtatatttgcagagattcttctactggcgcatctttccaacggcgaatgtcaaagtaacgttttccttcgcccattaactctatcatacgttcacgttttaatgctttacgcatatcatcaaccccactctgcagataaaattcatctggatagtcaggcaacccggcacgaatacgtaccggatgaatacctctttccatttgttctttatcacggctgatagtgtaggttgtcgcctcattccaagaaggtatattgtatgttccagtcaactcattcaatgcttcagcataaagcagtagaatatccgcatagcgaattgctgtttcagctttcgcaacataattgcctggatagtcgtttggatgaacaaactttttgattcctatacctgtacgcaagtagaaaccgtcattacgataaccatcggaacttccaaagtagtaccaaacttgttgatttacatcggcaggtttgctttcagtctggctcaaataataccaggtacagccattataagcaacagaagcatagaatcgtggttcgcgttctacatattgcaaagaaacattcatcccagttttggcctgatcgttatctcctttcttcggatcatatttccaacctaattccggatatttattatccttcaagtcttgcaaatcagtaaatccggttctacgttcacgagtatctacaataccttgataattagctactccttgatacatagagttcatacccggctcattactaccattattcatataatatgcatccagcattttctgtgtcataccatgacagttccagccgccatcatccttgggcatctgatgaagtaccaacatatctatatttgttgccccgcgtgtaaatatcagttctttattgtttgcaggtaatatagtaccatcaaagatagtacgatatgatctgagcgggtcaatatttgtccatccttttggccagggttgattggaaaactcgccatcagccggtggagtaacagtcggacgttcagaaggtccattatcagatgtggatttatttacaatattcaactcataaacatctaaatcgatgacatcacggcaagcggcagcagcttttgcccatttttcttcactatattcggaagaaagcaaacgacgcccttcatcatctaccaattgctgcgcatattcatcattatttccattagcaaacggactagctgcaaaaatcagtgcataagcacgaactgccaatgcagctccacgagtaggtcggcctatagcataattatcagtacgacgatcatattgtaactctttagtagcctgtaccatttcgtcactgatatattgtgccacttcttcgtatgagctacgtggagtagctatttgatcataactttgagtataatccactccttcgtccggcataataggcactggaccataacgacgtaagagcaaccagtaatagtaagcacgaacaaaacgagcctgccccttataatctagtatttcccaatcagccatctcttgacaccggtcaacattatggataaatactgatgcttggaaaattcctttataacatgccccccatgccccaacattataagtattctcatcatattctcctaacttgaacatattatatgacaattcattctttgttgcatcgattgtcttatcgcggtcaccataatacatatcgtctgaaaaacaaaacgaattctcacttggtcctttagtcgtcacctcatagttttcattttttataaatgaaaaagcataagctaaccattcttccacatgatccttactttcgaaagttttctccagtgtcagacgatccttaaaatatttctccgaattcaggtaatcagagcaagaagaaattactcccatccctaatacggttaataataatatataaatcttctttatcataatctcttagtatttttataagttaacagataaacccatagtaactgattttgttagcggataggcttcaccccgcggattgccagtttccgggtcccatgttttgaacttagaccatgtaatcaggtttgatcctgcaatatagatacgaatattattgaagtgcagtttattgactatgctttttggcaaagtataaccgatatccagattcttcaaacgaatatatcgaccatcacgcatccaataagtagaggtttgttggttgtttttattttccccataagttaaacgcggatatgttgcattggggttctcattagcatgcaatcccagtttggcagcagtctctgaatctacccaacgatcacttatcatatctttaaagatatttccccagtcactttcgctgaatgcatatacacacttaccataaatagggaaagtggatttaccggcaccttggaagtgaacatttacatcaattcctttccatgcgaaagatgcccctataccatatactaagtttggagtggtagtagcgccaatagcaactttatcattatcgtttacaacaccatcaccatttacatctttatatttgatatctccaggctgcactgtaccaaactcttgtttcgggctggtacgaatatcatcgtaatcagcaaacaatccttcagctatcaatcctttaacttgatctacacgataccctttttgatataaataagaatagacttgattctcttcatccttttcgagcacttcattcttactataagttatattcccacgaatagtcatatccacctcacccagtttctgcttaagagcaaaattgccatcaaaaccttgagatttcacttcacctacattcgctttaggtttgctctcaagacctgtaatgtcaggcaagaactcacgtgttaaaaaaatacctgtacgtttttcgtggaaatagtcaactgtcgctgtaaatttgtcattaaacaaagaaagatcaatccccaggtcatccttagtcgcaacttcccaagtaatgccattagaagccatctgtgtgtaatgagttcctatgaatgattttccataatcaccaaatccccagttatatacataattaggcttgccttcgctgttatatcctgtagtggctatagtatataagtatgggaaacggttgttatccccaatattatcattacctaccttaccatgagaataacgtattttaaacatattcatccacttcaagttattcttaacaaatgactcttcggcaacgttccatgcaagagaaaaagccgggaagaaaccgaattgatttcctggtgcaaaattttccgatccggtataaccaaaattaaaatcaacaaagtaacgatagttccagttataagtaaatcgtcctgctaacccttgattacgttttgatactccattcttaatatccgtaccaatgtctactgtccgcttctcactatcttgtgtgtaacggaaagtaactcctccatgatgatttccgaaagcacgttcccagcttaacagtaaatcaaggaattcacgacgtttgccagagctaccacttgattgtgtcatgtcatatgcggagaacattttctcataaataatctctcccgtttcttgtctacgtccgttcgctttatacaaatctggttgacgatgacgattaatccagttactgttgtctgtatcgtaaccaaaacgtcctacaaacttcaatcccttggtaatgaaatcaaaattttgttctaatgtaacattagtttgtacattattctgccaatcttcattgtatccagtttgcgtagatgcaacccagggattaagtttgtttacgttatcccggtgggaaataggcgcatatccattggaatagtatacaggcgttgcaataggattgtatccgaaaagcatgccccataacatctcgttatcagccagtcctggactattacgtttggctaatgaacctgctatacctagtttcaataaagtcgatttggtgatatctatatcaacattcatacgataattccactttttatagttggcatttgtatcgtaatcatcacgtaacgtttggtctgtgttatacataccttgatcttccgtataacttgcagaaacaaaataacgagcagtgttaccaccaccattcatgttcaagttagcgcgataactccatgctccgttttttaggatcaaatccatccagtccacattcggatagaaatccggatccatttgtgtacgaaataactctaattcttccggttgataggccattcctaaattgcgagtcactaatgcttcgttcatcagactggcatacgaaagaccgtctacaaattccggagtgatagtacgcgtattataagaagtttctaccttggcatcaatattgatttttccagctttaccacgttttgttgtaatcaatactacaccatttgcacctttagaaccataaatagcagtagctgacgcatctttcaatactgtgaatgattcgatgtcttcaatgttaagttcatccaaactgctacgttcaaagccatccaccagaatataagcacttgaactagctccaaaagtagaaataccacgtatccaaaactcagaagtactttttcccggttgtccggaagtttgtcgggcaataatacccggaacattaccggccaaagcgttagacatattggaagtagggaaacgttttaaatctcccacattcacattggttacagctcccgtcactgtcagttttttctgtgcccccataccagttaccacaacctcatccagtacactagcctctgattctttcatctttacattaacagtatgctgttcttttacaagtacttccacatcatcatatccgatgtatgagaagactagtcgatgataaggttccatctttatagaaaaattaccattgatatccgtaatggttcccaaacctgctacatcctttacagtgatattaacaccaatcatcggctcatcttgtgtgtcggtaaccgtaccagtcacggtaattgtttgttgtgcagaaatcgtcaatgggacaaccagcatcaacaaaaaaatggctaaatattttttcataatctgataaatgtgtttattcgttagattccactgttgattcatcttccggtatattctcgtcaccggctacattctcttcttgctccattgaaatagtgcgaatagtatgtcccacctgatcatgtacataaaacatctctttcgcatcatcataaacaagtccacttacatcacggaaacgagccacttctcgtaggtcaccatcatcagttccccattggtttccgtcagctaaggaagttgacgctcctcgtcccgcataggtcgatacgataccttctggagttactttacgtacacagaagtttaatcgatctacaaaatagaaatcatactcttcttcaccagtataatccggatttttcacaaatactccttgacaaggattattcatacgtgcctcagttcctacatcatccctataacctgactgtttatatcccccgacaaaattatacggggtaataaattccttttttatctcgtcatagtcggaacgcatgaaataatgattgttaatcacaccaaaataagcatactttccagtaggatgaatgaaaatctgaaattcccaacttgggtcagcaatagtgaataactgcttaaaagtattaggattgttctttactataggatcccaacttccaccattcttaatagttttaaagtaatcaaccaagtctaaacgaaatacttgtcccttttcataactattaaaatacaattctccgttgattggatgaatagtagctccattacattgtttgtaagcagctatcaattgtatatcagatctatcatcgaatgtaccatccgcattacgtttaataatatatacactaggactttcatctcccttaccatcataatcaatagctacaatcatatattctgcctcatcagcatatccttctatcttcttattgaaagcaatgcttcgtatacgattagtaggtatagtattgatattcaaaggagaagaaagcatacgattttttaaatcgatcaactgtatagctttatgtccatcgtaacaaatatacaaatgatccttattcaacggatcaaaagctaatcgtccgttatcgctaaagccacagcatttgacaccttccggtccatcaaatggtccgtctctccaaccttgatcatcacgattattgcgatagccacaaagcgtacctactaccatctttttctcatagctaaaagtagtactcgcagtcgttgttactgcattctctccttctcctacagtgatttcaatttcaccactaaaagctcctgaaggaacaaaacagtaaacataagtactttttacattaataacaatagcatctttgccaccaatcttcacttttaccttcgaaacatctgttccgaaattttcaccataaatcaatagtttctgataggctcctccttctttcggagtaaaatcagaaattgctacaggttttgatggatcaaaggctccagtctctacattgtcatcgtccttacaactacaaatgcaaatcgtgaataatgccagcaatatccaccgccattccttcaatacttttttcattttacatttcatgtttttcattctatttaataataaatgtatagttaattaaacatttcatcgagttttgtccattaacacttgcatccagtatcctccaataaccgaacgcgctttaaacccaacccattcaccactgtctgtgtgatgccaatcactgataggtacccgcgaagtagtttcattgatatatttatagagtggatctatgaatttcttgaaagtttctaaatctgaagacatagcagctgtccacataatccagtcagactttgtatactctttgcgggagtccaatggcaatccgtaaggattctgttttgtcaaatagtaacttacttccttgtcgattacattattggggaacaaattcagattccacatcttgtcccaaatcatattatatttctgactccaggtattctcacggtcgaaagcaaggcggtaatgatcaccttcatttgccatttcttcccatttcaccgccattttcttggctatacctgcatatttctctgcaacatcatataaaccaagcatatgcgccatttcgctatatccggctacacccatgatcgcttttactgaaagattggcattatgggcccaatgaccggcgaagtcatcagtgcataattggttctccgggtcctgtccaaaccgtatagcaaggttgtaaacagcatattatcaacggtttaattcggtaacgtattgtatttgtgttgttctaactcaatctttatgctatttatcaatagtgctatgtcaacaaatttgcattatctcctctaacccgattcatatacccccatgttataaaaatgtttggacatatagaaagatatgttataacggaattagaaacttaatctgcattacttaaagaattataatataggatgaaacattcataattcgcatgctaaaattgattgttctcaatttattttgtattttcgcaacagcggttgagtcaatggccgttgagaaaacaaatcatcattatgaaattctataatagagaaaaagaagttgcggaattaaaacgtgtgcaagagcttgcattcactcaaaactccagaatgattgtggtcacaggacgtagacgcattggtaaaaccagtctcataaaagaggctttgaaaggaacacctacagtttatttattcattggaagaaaagctgaaagcatattagttactgattttgtaaagatagcacgtgaaactctatccatattcgttcctgaaggaatacctacttttaccaatctgatgcaatatctttttgaagttggtaaaacacgtgcttttaatatcgtcatagatgaatttcaagagttttataatatccgacctgacgtctttagtgatatgcagaatctttgggatgagtataaacaagaaactaaaataaatttggtcatcagtggttctgtgtactccttaatgcagaaaatattcacagatcataatgaacccctatttgggcgtgctgacaatattttatgtctgcgtgcttttaagatcggtgtcctgaaacaaataatggaggatctcgcttccggatatagtaatgatgacttattagctttatacacattgacaggaggaatccctaaatatgtagagttgttttgtgataaccaagcgcttactatagataagatgtatgactttgtcttttcggaaaactccttgtttatagatgaaggacgtaatttgttgataactgagtttggaaaaaactatggtacctatttttccattttgtcagaaatcgccaacgggcattatacgcaaggcgagatagaatcggcattgggcggtacagctatcggaggttatttaagcaaactggagaatgtatacaatttaataacccgggagcgtcctatttttgcaaaacccggaactaagaaaaatgtacgatatgttattggtgataatttcttgaatttctggtttaaatatattgagcagaatcgctcttatattgaattacaaaattttgatgatctgagacaattagcaaaagctgattatccgacctattcgggtagggtgttagagaaatacttcaaacagaaattggcagagaccggaggtttcaaggaaataggctcttggtgggaaacaaaaagttctattggcaaacaacgaataaattcttatgaaatagatattgttgctcttaaatccagtggtaagaaagctcttattgctgaagttaaacgagttcctgagaacaactatagccatactgttttcatggagaaagtggaacatttaaaacaaaaagaaatgtctaaatatgatattgagacacaagttttgggattgaaagatatgtaaatataataaagaggtttcatgacattaatcatgaagcctctttgctcgtaattccttaattcttgattgcccaagagttcagacattgttgtagtactaaagatacttttaaccgcaatgacggactcaaccggctactgatgttccaaagtagaataagtcagcgtaccggtgactccattgctgattgtttctgcactaataattaatggagcagagtaattactgttataacattcgatggttgctttcccctcactgtctgtccggacagaagaattccagtaaagagtccgcctttgatctggttggactgggggaaatgcatctgtatccttataaataggagagtaaaactccaacgggcggttatatccctgaatgatcgtctggcgggtaccccgtgcagcctgttgctgcttgttggcaatatcccgcaagggcaatgctgtaagataaaacaccgcatacttactgagttcggtcacgttcactctctcttcgtgatcgaagtcgcgaggcccattttccagagatgaaacttgagcgtctttaaacgctccggcactgaatgcatttgccccttcacagatataaatggattgcagcccatctacttcggtcattatggatgttgcctcgatagacgtcaacatacggcctcccagaaaaaaacagattggtttctgcttgtagctgtatgtgtcgtcctgcttgttccatcggaagaaaggagttagcttttcaaacaactccggtaaggtatagatttccttcccttcgtcccgcagccggtctacagactggcggatatcatagtaagcatccagactttgctggtagatatgagtctccatagtggcatttttccttcgtttcgctactacctcaaccgtattcagcagatgaagattatctacttgccggatagagtccaaatagagcgagtcagtctgttgagtgttctgtatccatttgctgacatctttccattgaggattccattcggtatattcataagaacggaggttgggactaaaattacggtcaatcagaattgaagccattttcttcctgtctttccctcctctttttgtttgaaagatagcttccatcgtattttcaaaatcttctaccggtatttcgaaatggccttgcccgttcgtcactgtgcttccggcaataatcacagagtctgtttttgccattacactcacggcgatatccttcaactcattcttctgtacaagagattttacctgaccatgaagaatcagctttgtttcaggagtttgaagtggtgagaaagacttagtaccgatcaattggctcatatcatatttgcgccaaccatgaaccatgagcagtatatccagttcagcctgtttctggagagaagtgcctgcaaaataataacccggttgatgaatatatccctttaaatcggaagttagcaataaatccgtatagatattattgtcacactccagatagtcagaacgcaccgcatcgcgaatagaaacggaaagattcgtttctatcggccgtcctgccgcgtcagtaacgcgaagttggcactgaatcggtgcatagggcgtgtagacgggtttcaatccgacggtggaaatccgcagctgagacttgggagtaacaaagctgaatcgggtacagagagttgctccctctcggtttatcaaactgatttgcaatacccctgctggtatgtctttcattcgtatcaggaatgtgccgggtgcttctgctgtgcaacttatcagctgataggcaaaaggttgcccttgatggctcataaatacggcaagtgtgtcgcgcggggtctcattattgcaggatacttgtatggctagtcctcccggtttgttggtaacgttcagaacatagcctgccggaagtgcttcgggtagcttgaattgatattgttttcctttgtaagtcactttggctatggccggtttttcatcgggtgtatattcaaaacggcccattccatcgtgcaatgtttgcagcgtgccaattttatttccgttggcattgcaaatggtaccctccatttttacgttcgcctccgtactgctttctgctttaaaggcaacctgagtaggtacggcttttaccagttgtcctccttccggaaaaaagcgaagggtgaatttctctttcttttccggacgttgctgcatcgatgggttcagctgataagtggtaatgctgcgttccggtttttctccctttgaggcgaggtagacaggaaaagttcgcgagaaatatgtctgctcatcaaatcccagcatccagcgggtaaatgcacgtatttcataatagccggataggatggaagaagcaggaagaatgaattgtccgtgcccttcgccgtcagtgattttaatgatttgtttttcaacgatatgtcctgtctggtctgctaattcgacatacagcgggcggctgataggcgtaggcaggagctcttcggacaatgtgacataagctttgaaccaaattgtgtcacccacataatagcttgtattatcaaagtgcagatacgctttctctcgtggataagctttggcaaaagagagtgcctggtccagataatgattaaatgtatcttcggcgggtggtactcctgcccgtgaatgtgccgtacatattaagattatccctaagaaacagactaagaattgtttggtatacatgattgtattcttatttaatgtgatcagaatagtaagtacaggtgaccctaagggtagagaatatagtgccatgttcgtgccacacctttggcacgactgtgccaagcgcttggcacaagtataaagaaagctgcctctgagaaagagacagcttccttttttgtgttgcttcctatcaatgagaagtagcttcttcttctgttctgatatcaatactttctgagcgtgtaagtgttccttcaaaaatcatcttgacagggtattcggcatcacgcaaattcatgtacgaataatgaagatacaccttagttactacattctccagattgttgttaacagggtcggcagttcttgagacctcaacccagcttttaccgttgctttcatctttaatgtttttgtccgcatttttagagccgatcgtaacaactgtgtatttacggatttctgcgccagtttcatcattaaccgagtcttcataactgtttttatcgactttgactgtcaacgaatatcctgcccggtcctcatcactatctgtcacgttacccgcataaaggtaacactgatcggcagtcaaggcacgcaaaactgtagaagaaataggcaatttctgatccggatagctctcttcccatactctgccgtctacattgtaattgcctgagaagaaattgctgacattcaatctcatcaatagctttgtatatttactccaggccatttggtaggtggagacgttctctatctgcagcggtaaaatatagttgctatacaaatcaaattccttcagattgagagttagcgggaaaacagcgtaatcacttccactttttatcgttatctctggtcctgccggaaaagaatacattttttccgatggaagtacataatatagagctgtacgattacggaaacgttcaaaattgtaatctttcaacgtatctgcatcttctataaggcgtacagttacgtctctgtcattttttgaagttccgttaatagaaatgggtaacttcaattcgacctgtccctcaccggtgaactcaatgttatagtcttgtaccccatttttggtcagtaagaccattttggtaaactgttcgtcggctatgttgttatcacatgaagtgaaagagcatattccaaacaatacggcggcatatataaatatcttcttcatatttctctaaattaaatctacaatgattaccaacctggattctgagtcagatgaacatttctgtctagttctgctcccggcaatggccataagtactgtctctctacgaatgatttcggcatagaagaaataatcacaggagtgtaaaaacgttgtttttgtccttcagcgtcactcatatccatgttacatccccgaataggcatattctgttctaccatagcatccaaccaccggttcaagtcatagtaacgtttagcctctccaaagaattctacctgacgttcgtgtttcaaggctgtatcgaaagctttctcatctttatatatctgatcgtcaaagtcaggcaatcctacacgtacacggatagggcgaatacagttgtgcatctcttcgatgttgcgacttacgtgcactgtcttcgtccccgtataatctgctatatcatattcatttaccgtcagatggttcatagcttcagcataccataacagaacttcagcataacgcacaattggttcgtatttatcgcagacttttgcaccttgtagtttcactgcatcttcttcataataatacttgcgaagcgtatagccggtcaacgggtggaactctatctccgagaggttctttccatccggtttacctttgtagtattgggcacggtagttgtgataggtcgttcctccttcagtagcactggtacatccccatacggttccgttgtaaccgatagaagcatagaagcgaggttcacggtgtacataacgcatagaaacatcatcctgcacatagtcacatttgatctgattggggttacttgcatcgtaaaaaccttctgtccgataagggtattctgacgatgagtttgtaatatcccgtccatcacacatctgataagcatctacttgtttttgagtgacagcgatacagttccaggctttcacataacggggaagactatgttctatcaattcataaatattattattattgtcgttcgcccaaatcatctcactgatctgtcccagtcttttatttccgtcaaacaactgtgtatatgactgataaggatcaatatcggcccatccctgagggaaattcgcatccgaatagcccatgcgctgaggaggttcaatcgttgaagctgttttcttcacggtaaagagctcataaactcccaggtcaataacctctttggccgctgcggcagctttcgcccatttctcttcagagtaccccggagtaatcaatagttcccctttgtcattctttagattataaataggggtatcttcactgttaaacaacgggctggcagctaaaattaagattttagcacggatagacagtgccagaccttttgtagcacgaatcagattgctcttattacgtgtttcgggcagtgaggcggcagcctgagacagttcattgcacaggaagtcgacgcattcgtccattgtattacgtggtgtacccagttcgtcatatggtttttctacatccagaccttcttccggcataatgggtacagggccataacgttcgattaacttatagtatatatatgcccggacaaaacgagcctgtgctttagcgtcatcccgttcgctttgggacatttccagacatttgtcgacgttcattataaatagggaagcggtacggataccttgataataaactccccaagggtcgttggcatgctggttgcgtgccgtgtattctccgttctgaaagatctgattcttatagtcgcgtgacaaccagtcgccgaagattaaatcatctgcccaaaacagaggtccgcaatccattttccggacgtcttttctgctgttactaccccatacggaaaggtaagtattggctagccatccttccgtgtagtttttgttgacccacaatgagtcaaaagtcaatgtgtcattgaaatatttgtcggtgtccagatagtcggcgcaagaagccagtgatagtccgaaaccgagaattgctgaatatattattttcttcatatttttcattattaaaatgtatcagaaagaaagttgtacacctacggtgaatgtttttgtgatcggataatttacaccgtcaccacttccattctccggatcccaccatttaaacggactgaacaccaacaggttatttccaaggaaatagaaacgtgccttctcaataaaccatttgcgtgataacgttttaggcagtgtatagcctacttctagggtcttcaaacgcaaatagcgggaatcacgtaaccagtgagtagagtttctgtcattattctcatttttaccatatgtcaaacgagggaacagggcatcggttctttccgtgtcgtatgtaccggatatttcgtgtgaagtccagcgattttcctggtcagcaacatatgtcaagacattaccactttcaccaccggagaatggacgagagtatcctgacaggaagaaggaacttttacccgaaccctggaacaagatgttaatatcccaatctttccagactgcacttcctccaaaaccgtaagtaaggttaggtgtctctgtatatcccaatggtacttcgtcattttcatcaataataccatcaccgttcacatctctatatttaatatctccgggcaatacggtaccaaatgtttgtttaggactgttatcaatttcttcctgattagcgaaaagaccttcggcaatcagaccgcggcattgtttatgccgatatccttttgtcattttgtaaggtaaaacattggctgcttcatcatggtcgatcacttcgttgatagcatatgtcatatttgcacggagtgttacgtctacatctccaactttcttatatacggcaaaattgccatccacacctttcgactccatcacaccaatatttgcccacggcttcatctgttccacacctactgtatatgggatgttgccacgttgcaggaagatgtcttcccgtcggtctttataaatatcggcagtcagcgtgaaaagtccgttccatagacttaagtcaataccgatgtcatatttgattgccttttcccaagtcaggcgattggctcccaatacagagatgccatagccaccaataaaattggaacctgactcaccaaaagcgaaaccgtctactgttccgatagaagtaatgaaagggaatctggcttcatcgtctttaccaatctggtcgttacctacaataccgtaagaagctctgattttaaacatatccatccaggaagcccaatgtttcttaatgaaaggttcttcagataccacccatcctaaagaaactgccgggaaccatccaaagcgatgatctttctggaagttctcagaaccagtataaccaaaatttccttcaattaaataacggtcttgatagccataagtcaagcgaccggagagtgccatatgccgtttaggaataccttttttgatatcttcgcccacattgttagtatatgatacttcttcctgatagtaaagcagcatccccgtgatacggtggttttctttaaacatacgttcgtaattcaaagaagcctctgtatagaaacgtctggttccgttgttgtcagaagtttgtgcgagtggttttgcagaagatacatttctcatgacaaggtcaccattgctgtcacgttgaggttctgcatggaacaaattaggagatttcgtgcggtataagttctgatcggcatatgtatcaaaagcaaaccgaccggtaaaagtaagtcctttagtgatgaaattcaaatcttgtttcaaagacacattagtttccatcttgctttccgaacgctctttgtatcctacccggttaattacagcatcgggatttaagaaatcacctgttccgtaagtcggtactaaaccgttagagtatacgattggtacacgcagaggtaccagtgcagataatgatttccaaattttatcgctgtctgttgtcggagaattgtgcattgccagccatccgccgatacccaattctacaactgttgacttggtgatgtttacatccacattggcacgatagttgtagcgcttataatttacgttggtattgtaagagttgtagtcacgtgttttatatactccttgttcatcgtagtagcttcctgaaatgtaatagcgtgccgtgctgccaccaccactgatattcagcgttgccttatagcttggggaagttttatgcattacataatctctccagtttacatttggatagagatccgggtctagtccgtagcgcaggatatcgatctcctcatcagaatatgtcggatcttgaaaacgggacatcttggcttcattcattaattgtgcatacgtcacaccgtctacataacttggcatttttgtatgggccaacacaccatactcacctttaaaatcaattctgaccttaccggctttaccgcgtttggtattgaccaatacaacaccatttgcaccacgttgaccataaatagcggtagcagaagcatctttcaacaccgagaatgattcaatatcttcaacgttcaattcattgaaattacgttcgataccatccacaagtactaaagcggaagcattagctccaaaggtactgattccgcgaatccagaactcagacatattgttgcctggttcaccggaagtctgctgtgcaataatacccggaacatttcctgccagtgcattagtcatgttaccggaggcaatacctttcaggcgttcaggtgagatcgtggtgatagcaccagtctgggttatcttacgctgtactttgttaccaccgacaataacgacttcatctatcttgttggattcttctttcaatacgatgttgtccagcttggtttttccctgaataggaatttctttatcttcaaatcctacataggagatcacaagaacgtcataattatttgctttgatagagaaatgtccatccacatcactaattgtacctagtcccggttgattcttgacgataacagatgcgccaatcaatgcttcaccagtcgcatccttgatcgttccggttacagttttctgttgttgggttacttgttgagcaaatgagactgtgaagcctatcattaacaacagagtagagaatattattctttttatatgattcataattgtatgctgtttttcattattcaactacgattttgcggataacatgattgtcgtggtcagctacataaatgaccccgtctttcgaacgggttaagccttccggacgtctgaaagacgattttaaaggtaatccattgaccaaaccttcagaacggtttccagcataaatggtaacattaccatctggcgtaattttgcgaatgcagttgttgtcacggtcggatacatagagattgccatcttcatcaaatacaccttgacaaggctggttaaatcgtgcttcttcacctataccattggcaaattctgctttctcatattttcctgcccaaagagtttcatcccctacaaactcatgttttacaggatcatatgtacgcttgtagataatgtgtttattgcggataatacgggcgaatgttctgccgtctttactccagcaactatacgtctcaaaactattatcagagtgtatcccattcactttcttataggcgttcggattgctaggcgggcagtaatacatagtgccatcaccaaacttattccaaaatacatatccgtctatggggttgacagagactgtattacattggtctgttacgcctctcatatatgtccgtggacgaccaaacgcatcatcacgaagcatataatgaacagccgggttttccatattatcatctcgggccataagcattgtgtctccggttatagaaaagtcgatagcgcgtttacgatatccggtactggcaaatactgtagagactttaccgcttgcctctaatttgcgcagggagttgttctcttccagtatataaattgttccatcattatcaatcaacaaataggctacatctttaaaagttgcttttgtaggagcatccgagtcttcttgaccttcagcacccgatccggctaacgttgataccatttgagtcaattcatagttaaatttttgttcaaaagtatagggctcattctcgccgattgttacgctaatcggagtttcaccactttcatcaacagatcgagctcttactactgcataaatctttgtaggtgatacacctactacttttgccatacgattaccaatctttacttttactaaagttgtgtcattcccaaagttggatcctgttataactaactgagtagtcgaacctcctttttcaggagaaaagcgctcataattcacaggttttgacgggtcgtattctgtcgctccatcatcatctttacaactaaagcaaaggattagtgacatcagaactaacaaaagtccccaatgcccttttttctttaatgtgtttttatacataaaatatagatattaaataattaatattgttccgattgtttatccattagtactttcatccagtatcctccaataaccgaacgcgctttaaacccaacccattcaccactgtctgtgtgatgccaatcactgataggtacccgtgaagtagtttcattgatatatttatagagtggatctatgaatttcttgaaagtttctaaatctgaagacatagcagctgtccacataatccagtcagactttgtatactctttgcgggagtccaatggcaatccgtaaggattctgttttgtcaaatagtaacttacttccttgtcgattacattattggggaacaaattcagattccacatcttgtcccaaatcatattatatttctggctccaggtattctcacggtcgaaagcaaggcggtaatgatcactttcatttgccatttcttcccatttcactgccattttcttggctatacctgcatatttctctgcaacatcatataaaccaagcatatgcgccatttcgctatatccggctacacccatgatcgctttcaccgaaagattggcattatgggcccaatgaccggcgaagtcatcagtgcataattggttctccgggtcctgtccaaacgacccgcaaacacattaacatcctattaattaatggattatgattgaactgtattgcgtttgtattgtaattctatgtattatacatgaataaataagttacagaaagaaaagaattataggaagtatgagatacttgtcttatatattagaatagcagttccttatagatttatttaaaaactttattttcatctgtctaaatgctctaacgatgtaagaatgaagcatatctgtttggacatgaacataaactctataatattaccgatagtactttatatgattagatatcagtaacttatagttttctgtcatttcttggaatggaaactgtcgtttcccggtgagggaacggacgttccttttaatggaaacgaccgttccttttaaagggaactggcgtttcctccgaggaaactaacgcctgttgtcttattctaaaaatggttatagttttatctccctaaggaattcatctggctaatttggcacgcaactcttttagtcttttagcagcctgctgattatccactttaatatatcgcataaacgcagatggacttttatgtccggatatacgcattagttctgctgcaggaaaaccagatagatacatgtttgtacaaaacgatcgccgacaggtatgggaagagatcatttcccatttctcatataccctcttttctcgctctttacctttcctgcggacaacttcaatcttttggctcaattttatcttccgccccaactctttgactctctcattaaacatgtatcgtgggattttaggcaaatcataattatactttttaagaatttcaggcacataatcaatcatgggaatcactacagccttgtgtaccttccgctgtttgagatttatattctcattatccaaatcaatatgctcaggacttaaagttgaaaggtcactgtatcgtaatcctgtgaaacacccggtaatgaatacatcccgtatctcttccaattgcttatcatctgataaatcaagttcgtatattgcagccagctccttttcatttagataaatagcatcagtttcctcttctacaactttgaagttctttaggtcaatcggtggaataattccttttactatttgataattaacaaagcctttcaacaaacgtatgatttttcctgcagaattggtgagcagccctacagttccgtttggttttactactttatgaaatagataatccataaactcgttgtaaaatgtcagattcaagttgcggaatgttacaggttgtgatgagtattctttgaaggcggtcagatgcttgcggagtgttcgatagtcttttatttgatctgcagagacggatggtgctttttccactatataccgttctaatgcatcaaacatatctacccgattaggacgcagatcatattccctgttcttttctaattcaagcaagacaaaatcaactgtcggatctatgccgtttactttagcataggtgagaatatcaccgagcttagatgttatcttaatcaagcaggcgtcaatttcttcataatggggacatgcacgcttaatccatttcctttttgcatcccaatgttccggtttgatattgtatccggtagagataagcgtgcgcttgttccgattgtaattatatcgaacataaaggacagtagttccctcttgggtaacgtacttgggcttaatatatggtatatattttgcgatggtataatcagtattgcattcgtgttgcaaatttacgaaagctatctgaaatgaccaatatctcttttgttaaagttagaagtcatcaattaatagaccttcattttgggttggtaaggataaaatctgctcaaaaaaggataaatactgctcaaacaacgtcagagcccctattccgtatgttaaaagaacgtttgaaatccaaaaaagaatagattttgtcctttcttgaacacagattttccttgtttcttctattaattccattattttgtgtcatcaagatgagatactatggaaaataaagagtttgttaaagctcgatatttgctagaaatacacgatttgttagccgcttctccataacatttcatcctaaatatgacagtactgatattatatattaaaggtataggaaaacgggtataaagattgcaattattcaaaggtgagatagtattaaggtaaaaagtggatttaaaagaatacttagggcttgtttttttatgaggtaaataagattgatggatggataaccttggatttgaagattaatttaaagcaaatatttatgaagaaattgctagccataatggctctttcagtcggcttgttggcaaatgcccagaccgttgacttattaaaacctgcaaaagatatagcgctacgtgctccgtcggtgcctattatcgtttcagatccttatttttcgatctggtcaccctatgataaattaatggaaggtagtacagagcattggacaagtgcgaagaaacctttattgggtgctctgcgtgttgacggaaaagtatatcgttttttggggaaagataaaattaatctggtacctattgctcctatgactaatgtagaacgttgggaagcagcgtacactaacagccaaccatcaaatggatggcaagaatttcagtttgatgatagcaattggaagaaaggtaaagcagcgtttggcagtcgtgatatggaacgtattcacacagaatggaaaggagacaataccgatatctacattcgtcgcactttcgattttaatgaaccgaatatcgctgaagatatttatctgatctattcccatgatgatgtatttgagttgtatctaaatggggaaaagcttatttctacaggacttgtctggaagaataatgtatatctgaaactttcagaagaagcaaaaaagaaacttcgtaaaggtaagaacgtaatcgctgcccattgccacaatactacaggtggttcatatgtcgatttcggattgtttcgtgagaaggaaaatgctgttaagtttgcaaatgaagcagttcagaaatctgtagacgtattggctacttccacctactatactttcacttgtggccctgtagagcttgatgtcgtgtttaccgctcctcaattgattgatgatcttgatttattgtcaactcctataaactatgtttcttatcgtgtacgttcattagataaaaaaactcatgatgtacaattctatatggagacaactcctgaactggctattaacgaaagtaaccagcctactgttgctcgtaccttatcaaagaacggtatcagttatgtagaagcaggttcaatcgatcaaccaatatgtgaccgaagaggtgacttgatttgtgctgattggggttatgcatatcttgctagtacgaatggatcaggtaaatcagtcagtttgggagactattacggaatgaaagaatcattcgtgaaaaatggtacattagccactacaaaggctaaatggacaactcgtaaagaggaagataatccggctatggcatatgttcacaatcttggttctgtctctaatagcgggaaagaaggattcatgatgcttggttatgatgacatttactctattgagtatatgtacgagaagcgtatgggctattggaagcatgatggcaaagtgactatcttcgatgctttcgaaaaattgagagacaactatcaggctattatggaacgttgtcgcgcctttgacgaacttatttatgacgatgcagaaaaggcaggcggcaaaaaatatgcagaaatctgttcggcatcttatcgccaagtgatctctgctcataaactctttactgataaagaaggtaacttgttatggttctctaaagaaaacaacagtaatggttgtgtaaatacagtagacctaacttatccatccgcaccactatttttggtttataaccctgaattacagaaagctatgatgactagtatctttgagtatagtgctagcggtcgttggaacaaaccttttccagcacacgatttagggacttatcctattgctaatggtcaagtgtatggaggtgacatgccaattgaagaaggaggtaacatggtaattcttgctgctgctattagcaaaatcgaagggaatgctgattatgtaaaaaaatattgggatctcttaactacttggacaaactatctcgtagagtatggacaggacccggagaaccaattatgcacggatgacttcgccggtcattgggctcataatgccaatctttcagtaaaagcgatcatgggtgtagccggatatagcgaaatggcgcatatacttggtttatatgatgttgcagagaaatatgcaggtatagccaagaaaatggcggtgaaatgggaagaaatggcaaatgaaggtgatcattaccgccttgctttcgaccgtgagaatacctggagtcagaaatataatatgatttgggacaagatgtggaatctgaatttgttccccaataatgtaatcgacaaggaagtaagttactatttgacgaaacagaatccttatggattgccattggactcccgcaaagagtatactaagtctgactggataatttggactgcaactatgtctccggatcaggctacttttgaaaagttcataaatcctctctataaatatatcaatgaaactacttcacgggtacccatcagtgattggcatgatacgaaaacaggcaaaatgactggttttaaggctcgttctgtaatcggaggatattggatgaaagtactagtgaataagaattcaaataatctgtaaaaatgaatacaaatatttttaccaataaaatccaatgtattatgaaaatgaaaagtaagaccaaaagttgctgtcagtacactcaatgggtagtactggctttacttacacttatctttgctagttgcaaagataatgatgacgcaacaggagattttgatccgaataagcctgttgtcatttctgaattcagtccaaaagaaggaggacttggaactcgaatgctcttgtatggagagaacttcggaagtgatatttctaaaataaaggtaactatcggtggacaagactccaaagttgtaggagcaaaaggaaaaagcctctactgtgttgtgccagctaaagcttatgatggagatattaaattaagtattctcaacgatgaaggtgaagaaattgcaaatacagaagccaatgagaagtttgtatatcaaaagaagatgcttgttacaacatttctaggaacaatgtatgatggaaacaccaaatatgatttaaaagatggaccttttgatgattgtggtggctttggaggtgctgtttggttgtcctttgatcccaaaaatcacaatcatttatatctagtgggtgaacagcaccctacccgtttgattgactttgaaaaagaatatgtaagtaccgtatatagtggattaagcaaagtacgtaccatctgctggacacatgaagctgacagcatgattattaccaatgaccaaaataataatgatagaccgaacaattatattcttacacgtgaatcaggattcaaagttataacagaattgacaaaaggtcaaaactgtaatggtgcagaaactcatcctataaatggagaattatatttcaattcatggaatgctggtcaagtgtttcgatatgattttacaactcaggaaactactcctttgtttacaatacaagatagtggatgggagtttcatatccaattccaccctagcgggaactatgcatacattgtagtagttaatcaacattacatcttacgttctgattatgactggaagacaaagcgccttaccaccccatatattgtttgtggtcagcagggtgccaaagattgggtagatggagttggtaaaaaagcccgcatgcatgctccccgacaaggtacattcgtaaagaatccagcatacaaagggagcagcgatgaatatgacttttatttctgtgatagagaaaaccactgtatccgtatcttaacaccacaaggtcgagtaacgacatttgctggtagaggcagtaatggaacttccggatataatgatggtgatttacgccaagaagcacgcttcaatcatcctgaaggaatcgtatacgatgaagaaagagaatgtttctttataggtgaccgtgaaaaccgccgtattcgcaaaattggctacgaagaataatacatgattaacacatacatttatatgatgaaaaactttttatttatatgcatgttgttgcttggactttctaccagtgctttggcacaagaaagcattgtagtaacaggtgtcgtaactgatacaaataaagagcccatgattggggttaatgtatcaataagtaatatacccggcttaggtgccattactgatttgaatggaaaatacagtattaaaatgccaccctaccacaagttggtttttacctacataggctttgaaaaagtagaagtattagtcaaagagcaacgaactgtcaatgtcacaatgaaagaagcaagtgctagagagattgacgaggtggtaatcaccggtaccggtgcccaaaagaaattgactgtaacaggtgctattactaatgtggatgtagatgtcttaaaagcaaatccctcaggttctatggctaatgccctggcaggtaatgtaccgggcatcttagcgatgcaaacttccggaaagccgggtagtgtttctgaattctggatccgtggtatttcaactttcggagccagtaattccgcattagttctcgttgacggattcgaacgtagtctggatgaaataaatgtagaagatgtcgaatctttttccgtattaaaagatgcatcagctactgctatttacggttccaaaggtgcaaatggagtagtattaatcacaaccaaacacggtaaagccgggaaaattaatatcagtgcaaaagcggaaacgttctacaatatgctcacccaagttcctgactttgtagatggatacacatatgcttccatggcaaatgaagctaaaatcacacgtaatcttgagccgctatataaagcggacgaattggaaatattccgtttaggactagatcctgatttatatcccaatgttaattggatagatgaattactacgaaaaggttcatggagcactcgtgccacactaagcatgaacggtggtggtaatacagcacgatactatgtatcaggaagctatcttgaccaacaaggtatgtacaaagtagataaagctttgaaagattacaatacaaatgcaaattttcgtcgttggaattaccgcatgaatgtagatatagacatcactaaatcaactctattaaaagtcggtgtttcaggttcattacaaaaggccaatgactcaggagttggcagtgatgctatttggacagctcttatgggatataatgccattatggttcctaaattatattctaatggatacgtaccagcctatggaaatgacaatggagatcgctttaatccatgggttcaagctacaatgactggttatcgggaaaactggaagaataatatccagactaatgtaaccttagagcagaaacttgatttcatcaccaaaggacttagattcgtgggacgcttcggatatgacacagaaaataacaactggattaaccgcagaaaatggccggaacagtggaaggcaaaacgtttccgcgcaacagacggaaccctcgattatgaccgtgtagctgaagaaagaaagatgtttcaagagagcggttccgatggccttagaaatgaattctttgaagcagagttacattatagtcgaggattcaaacatcatcatctaggaggaacattaaaatataaccagtcttcaaaaataaaaacggtaggccttggagacgatcttaaacaaggtattgccagacgtaatcaaggattggcaggacgatttacctataactggaattatcgttatttcattgatttcaatttcggatataccggttcggagaatttcgcagcagggcatcggtttggtttcttcccagccatctcaggagcttggaacatagctgaggagtctttgataaaaaaacatcttaaatggatgaacatgttcaaaattcgatattcatacggtaaagtaggtaacgacaatttgggaaatactcgtttcccctacctttatgatattgaaacaatgactaaaaaagatggtgacaaaactgtagacactggtggatacaactttggagattacacgtttgacagatattatggtggtatgcgctattcttctttatcttcgcctaacgttacatgggaaattgcaacaaagcatgacctcggtattgacttctcttttttcaatgacaaattatccggttctgttgactattttaatgagaaacgcgaaggaatctatatgttacgcgaatatttgccggggatagtcggtttagaaagtaatcctagtgccaatgttggaaaagtgacttctgaaggttttgacggacatttcactttccgccagaaactgggagctgttggcttaacaatacgtagtaatatcacttatagcaaaaatgaaatagtagatagagatgaagaaaacaactactactggtataaaatgcaaaaaggacatcgtgtaaatcaagcaagaggattgatatctttagggttgtttaaagactatgatgatatccgtaatagtccggtacaagatttcgatggttataaagtaatgcctggtgatattaaatataaagacgtgaatggtgatggtaaaattgacggtaatgaccaagtcgcaatcggtgcaacgaccaaacctaatcttatttatggattcggaatagctgcaaactggaaaggtctagatgtgaatctgcactttcagggagccggaaaatcaacttattttatcgatggctcaacagtccatatgttcaagttgggagatggctggggaaatgtcctgtcagagatggctaattccaatcgttggatttcagcagatatatctggtgatccagctacagagaatccgaatgctgaatatccccgactatcctacggacctaattctaataactatcagcaatctacttattggttacgcaacgggtcttatctacgtttaaagactgtagaagtagggtatacgctaccaacccagctggtaaataaggtacattttaacactgtccgtatcttctttgttggcaccaatttactcacatggtctgcattcaaattatgggacccggaaatgggaagtacggatggaaagagatatccgctcagcaaaaatttatctttaggaatatccgttaatttataatacacgcaatgacattatgaagaaaatatacattattttatcatttataatagggataggatttaccctcagttcatgttccgattacttggactctgattatctatttgatgagcgtatgtcaatagaagatgtttttacaagcagagcttattctgacaaatggctggcacgcgcatacttctttttgggagataaccatcttctcgatgtagccagtaaaggatatgttcctttctgttttgctgatgacatgtatttcggtgatcgagatgaccgatataaagcatggaaaaacggtgaatataacgaaggaggtttagcaggagaaagtgcagaaatctggaacaaatgttataaaggcattcgccaagcctctatatatttgaacaatatagacatgaatacggaatatacagcggaagaaattgctgacaacaaagcacaagcgcactttttgaaagcctatttctactggattatgttgcgcttgttcggtcctgttcctattgtgccggatcaaggcattgactacatggaagattatgatgcagtagcacaaccgcgtaatacgtatgacgaatgtgtgacctatatcacaaatgaattagttctggctgcgcaagctctccctttagaccgtgcaatacaagaaatagctcgccccacccgtggtgcggcattagctcttcgtgccaaagttctgctatatgctgccagcccattaatgaatggacaaacgcctgctgatattgcttcagaactggtagatgatcaaggtaatcgactgttaccagaagcttacgatgaatctaagtgggcgaaagctgctgccgctgccaaggatgtgatagaattgaaccgttacacgctgtttgtttcttatgctacagacaaaggggatattgcatttcctgcaacgattgctcctccataccaccctgaattctcagaacaagcttggccgaatgggtggaaagacatcgatccgttcgaatcttatcgtgctatattcaacggaacagtcagtgcttttgagaataaagaattaatttttacccgtgggcagaatactggtgaccaaagcattaataacatggtaatacatcagctaccacgtgttgctaaaggatggaatacacacggacttacacagaaacaatgtgacgcatattatatgaatgatggaactgattgtcccggtaaagataaagaaatcaaccgcggtgacggttcggaacgcatgtccggctatgtgacgaaagaagacgtagaagcaggtcgttacaaacctttgtcagaaggcgtctctttacagtatgctaatcgtgagccccgtttctatgcttcagtagcctacaatggtgatgtttggaatttgttgaacagcaataaaaatgcaggagaacctcaaaacatacaagtcttctattaccgtggagacggtaatgggtatacaaactcgatgttttggttacgcaccggcattagagttaaaaaatttgtacacccggatgatatgggtaaaggagacaacaatgaagaacttattaaaaagaaagtagaaccggctatccgttatgcagaagttctgttgatttatgccgaagcattgaacgaattaaacgggcaatacgacataccttcttgggatggtaataagactcatataatcaaacgcgatatcaatgaaatgaaaaaaggaattcgtcctatacgtattcgtgcaggagttcctgattatacccaagaagaatatgatgaccctatcgaattccgcaaaaagttaaaacgtgaacgtcagattgaattgatgggagaaggacatcgctattttgatttacgtcgttggctagatgctccggtagaagaatcaactccaatttatgggtgtaacactttagcaactaaagaaatggcagatgtattccatacaccggtagcagtaccttcattaccaacaaccttctcacgcaaaatgtggttttggccaatcaatcatactgaattaaagcgcaacaaacgtttaactcaaaatccaggctggacttatccggaataatcttataaacttgaaaaaaatgaaaaagatatattatttactcttagccatgactgtactgatagtatgtgcgtcatgcaataatgaatgggaatctgaacaatatgtgcaaatggtatctttcaaggcaccagtcaacgcacaaggagtaactcctatttacatacgttacaagccggaagggaaagtaacataccaactcccattgatagtcagcgggtcaaccatgaattccaaagacttgaatgtgcatgtaggattggatcttgacacattggatgtgttgaatgttgaacatttcggcagccgtaaagaacttttctttaaaccgttggaaaacaagtattacgagttcccggaaacagtacagataccggcaggcgaatgtacaagcttactgcctatcgattttgccctgaaagatttagatcaggtagacaaatgggtattgccgttagctattcagagcaacgatccatcacacaactaccaggccaatccccgcaaattttataggagggcgatgttacgtatttccccattcaatgattattccgggcaatatagtgctactgcgtataaagtatattttaaaggaaacgaaaaagaggctatagttccggaataccatacttcttatgtaatagatgacaaaactatatttttctatgcgggccttatagacattgaccgcttggatcggaaatattacaaaattaaatttgaatttacagaagagaaaatagatcttcaaacacgtaagctgaagatttcttctgataatgaggacataaatctggtagtgaaagggcaaccttcctatacggttgaagaagagatggatgctacacgaccttacctaaaacatatttacgtaacaatcaacaatctggaatatgagtttacagattatacttcagttccgggttatccgcttgaatatgttgtaaagggatctctaacgatggaacgtaaaataaatactcaaataccagacgaagatcaggcaattgaatggtaaatgccaattttaataaaaagaagagtgaattttatagaaagtttactcttctttctatatttgcatacagaataaaatactgagaatcaaataacttcaaaatgaaacatacgcaaattagcagaagagagtttctgaagaatatcggaatgaccggagctggagttcttcttgcagcaagtccctggctttctgccttttcagaagccgtgaacacctccaatgaaaaatgtcgtttgggggttattggaccaggctcacgaggtcgcttccttatgagctttttagtccaaaatcctaaagttgatatcgtagcactttgcgatatttaccagccttcgatagataaagcattgaagcttgctcccaaagcaaaagtatatggtgactatcgtgagctattggaaaacaacaacatagatgctatacttgtagcgactcctctcagttcgcactgtaaaattgtaatggatgcttttgatgccggtaaacatgtattctgtgaaaaaacaattggttttacaatggaagaatgtttccgtatgtacaataaacatcgtagtacgggaaaaatattcttcacaggtcaacagcgtctgttcgatcctcgttatatcaaagctatggaaatgattcatgccggcacatttggagaaataaatgcgatccgcacattctggtacagaaatggagactggagacgcccagttccttctgctaatttagaacgacaaattaactggcgactctataaagagtattcaaaaggactaatgacggaactggcctgccatcaattacaaataggaagttgggcattgaataaactcccagagaaagtgatgggacatggagctattacatactggaaagacggtcgggaagtatacgacaatgtaagttgcctatatgtattcgatgatggcgtaaaaatgacattcgattctgttatttccaatcaattttatggtttggaagagcaaatcatgggaaatctcggaactgttgaaccagaaaaaggtaaatattactttgaaagtatcccgccggcacccggttttctgcaaatgataaacgattgggaaaataaattatttgacactctgcctttcgcaggtaccagttgggctccggaaacggctaacgaaaacaaaggagaattaatcctcggagaacgtcctaagagcgatggcacttctttgttattggaagcttttgtagaagctgttattactcgcaaacaacccgcaagaatcgcggaagaaggatattatgcgagtatgctctgcctattgggtcaccaagcgttacaggaagaaaaaacactatatttccctgatgaatacaaaattaattatctgaatcatcaatcaaaaacatccgaagcagtatgaaagatacaatcctgaccgctcgacgaaagaaaacagagttgattacactgttcctgtgttttattattgccaatttggtcaatttatactctatatttacgtataatactcctttgacggagatgataacttcatttttttatgtgctcatattttctgtagcgctatatatcatctggagccttttacgtatcctcttttatggcataacagcactattcaaaaagaaaaaagaataataacagatttataacatataatcaacagaatacttaatcaatatcaatgaagaaattatggtaacacgaagagatttcctgaaaacaatgacaatggcttctgccggactggcagcaggagctggtgaaatattgaatgcacaaacattgtcatcttcaaaaaacaaaaacgaaaaagtgaagatagcttatgtaggtatcggtaaccgcgggcagcaaattattgaagattttgcccggaccggcatggtagaagtagttgccctctgtgatgtagacatgggtgccaaacatacacaaaaggtaataggcatgtatcccaaagcaaaacagttcagagacttccgccagatgtttgataaagcgggaaaagaatttgatgccgttgcaattgctacaccagatcactctcattttccgattagcatgctagctttggcatctggcaaacacgtatatgtagaaaagccgttagcacgtactttctatgaagcggaacttttgatgcaagcagcgctcaaacgtcctaatctggctacacaagtaggaaaccaaggacattctgaagcaaactacttccagttcaaagcttggatggatgccggaattattaaagacgtgaccgccgtcactgcacacatgaataacgtacggcgttggcataaatgggatacaaacatttataaactcccctcaggacagcaacttccgaaagacatggattgggatacatggctcggcgctgttccatatcatgaatacaatgaaaaatatcatcagggagaatggcgctgttggtatgacttcggaatgggagctttaggagactggggagcacatattctggataccgttcatgagtttttggaattaggattgccctatgaagtaactttattgcatgaaaaagggcataatgattatttctttccttattcttccactattcttttccgcttcccacaacgcaaagggatgccacccgtagatatcacctggtatgacggactagacaacctccctcctattcctgccggttacggagtatcaggattagaccctaatatccccacgactaaccaaggagatgttccggccgccaaattgaatcctggaaagatcatttatacaaaagacctgacatttaaaggaggaagtcatggaagtaccttatccatcattcccgaagaaaaagccaaagagatggcagacaagctaccccaaataccaaagagcccgtccaatcatttcgagaattttttattggcatgtaacggtatagaaaaaacacgttctccattcgaaatcaatggagtgctaagtcaggtattctcacttggtgtaatggctcaacgcctcaacactcagctgttcttcgacagccgtaccaaacaaattacaaataacgagtttgccaatgcaatgctgacagggatacctccacgcaaaggttgggacgaattttataaattataaatgaacataaccacccattaaaccagctataaacaatttactaagaataacattaaaaatgaaaaagaacttcttatttactttacttttattctgtgcggcttcattatctgcgcagacctgggaacctcttttcaacggcaaaaacctgaaaggatggaaaaaactaaatggcaaagccgagtataaaatcgtagatggtgccattgtgggtatttctaaaatgggaactccaaatacttttctggcaacaaccaagaactatggagacttcatacttgaatttgatttcaaaattgatgacggattaaattcaggagtacaacttcgtagtgaaagcaagaaagattatcagaatggtcgtgtgcacggttatcagtttgaaattgacccgtctaagcgagcttggtcaggaggtatctatgatgaagcacgcagaaactggttgtatccactgactttgaatccggctgcaaaaaccgcttttaaaaacaatgcatggaataaagccaggattgaagctatcggaaattctatccgtacctggattaatggagtaccttgtgccaatatctgggatgatatgacacctagcggatttattgcattgcaagtacacgcaataggtaatgcttccgaagaaggtaaaactgtcagctggaaagacatccgtatttgtacaacggatgtagaacgttaccagacacctgaaacggaagaagcgcccgaacgaaatatgattgccaacaccatatctccacgtgaagccaaagagggttgggccctactttgggatggtaaaaccaacaatggttggagaggagcaaaattgaatgcttttccggaaaaaggatggaagatggaagatggaattctgaaagtgatgaagagcggaggagcagaatcagctaatggtggagatatcgtaactacccgcaaatataaaaacttcattctcacggtagatttcaagattaccgaaggcgcaaatagcggggttaaatactttgtcaacccagatttgaacaaaggagaaggctctgctattggctgtgagtttcaaattcttgatgatgacaaacatccagatgctaaacttggagtaaaaggcaacagaaagttgggttcattatatgatcttattccggctccagagaagaagcctttcaacaaaaaagattttaataccgccaccattattgtgcaagataaccacgtagaacactggctgaatggggtaaaactgatcgaatatactcgcaatactgacatgtggaatgctttggttgcctacagtaaatataaaaactggcctaattttggtaattccgcagaaggcaatattcttcttcaagatcatggagacgaagtctggtttaaaaatgtaaaaatcaaagagctgaaataacttgcactgaaaagccgatttctaacataaaatcaagagtagaagggcatgcacaaagtggcatgccctcttaatatttcaataaaacaaaatgcagcatacaattcaacacttatacaagacacatggtgatgacggtttgctttatgcttggtttttatccatgcatacacgcgtagatataatactctgctgccagaaatcagaaaatgaattaatgcttgtagttaatagtatatatgacactctccgacaactggaaagaattgcaaattattatgacccttccagtgaattatcgcaagtcaatcaaagagcttccacagctcctgttatgatcagtcagtctctttacaggatgatttcattgtgcacagaatatcataaaaaaaccttaggatgtttcgatgttactatccactcagataattataatcaagataccatacactccattcatttataccccgaagcacagagtgtcttctttcaacaagcaggtactacaataaacctttccggatttcttaaaggttatgctctcgacaaaataagagaaatattaaaggttcacatcatagcaaatgccttaataaatatgggaaacagttctgtactcgctctaggcaatcatccggttggcacaggatggaaagtcagctttgacgatcaggcaagtactacaaaaaaccataaaactcaatccatactccttaataacgaatgtttaaccacctccggaaacaactcggatgatcgcaaacacattatctctccttcaagtggcaaaccactggaaggagtaagacaagtgacagtagtaacggatgatggaaccaccggtgagattctctcaaccagcctgttcgtagcaaatcaaaaacagcgcgagttaataatgagcgagtttctccccaaaagagttattgatttggaactgtgccagatggtttaggtaacggagtattcaccggtaaagggactcccaaatccggcattccatcagcatcccatcctatcttctgcaatcgtggattgcgactttccgactctcccgtattaccgctaggaacacttcttgcctgatacaatatataccattccgttccatcaggcgaaggaagaaaggaaaggttagccgggccatacactccatcttccggtctctgttgaaatacaggaacggggctcttcttccaggaagccggattcagcaagtcactatccgcgtcagcagtcaacattccggtacaataataaggagaccagcaaccgcttgccgcataatagacaatgacagtccggttatctttggaatgaaaatactgagggctttcatttacataaatcggataagcagtccgcccgccatccggatttacccactgccgttcccattcatactccggcttcgaaatcagaaccctttccgtagccaatgtccaggggttttccatgcgggcaatatagatgcattgtgtttcactgcctatcctccgattaggccacccggaccatagaagataaagctcccctttatgttcaaaagttgagggatgtattccccagttccaatcgggattggtcatgatcgctcctttcatgcgaaactctccctgcatagggtcaggagaatcattctcaatcacataaatctgatgattatctgtatttccatcatcggcagcaaaatagatataccatttaccattgatattccgtatttccggattccagaggttatggctattcgaaggatctttaggcacccagacctctttacaagtggaatgagccatatcggtaatatcggtggttacccacagatatatttgctcattagtttcatgggtataataatatttaccattatggtaaatcgcgcttgaattagccccttccataaataatggattggcataagtatctttttcaacatcttctttttttcccgcccgtttggaattacaagagatgttcagcaaaacaaggaataataacaaacataaattgattctcatagtttcatttttaagatgatacaaagaaaagacttttttttcattaatagttaataaagcgaaaataaaaattaagtttggaatatcattctcgtcattacatcgtgacacatcctgctgatgacaggaaaacagaaaaaagagaatgtaaagacaaactacccattaataataaaaacagaaagtttcttggtatcattacacactttcacacgaaatatattaaccctttatatacttcctccgaatcatttattaataaattcgttcatcgtttattataaacgtcccccaagtttattataaacccgagcatcgttatttcagcaacaaatatcaattttaagcaacaaaaagggctgcaattcccataaagaatcgcagcctttagcttgtatcagactatccggcaagcactatccgaagtggaaacgcttgcaatctgttattatattgtacttattattactcatttttcgtctatattatcaatgttatcgaatttacttccggttctcacttacaaatatacaacataaaaaacggtttgtcaagccctgcatgcttctttcatacatctgatgataaatcaaatggtagaatcggcatccggagtgctttctaccgctgtatcggaaacagacaactgattgacatattccttcgggagaactccatattgtgccttgaaacacttggcaaaataagaggaggaagtgaatccaacctgtgccgcaacctcggaaatacgtgtaccgccctgaattaactcagctgccttattcatacggagggccttcagataatcattgggcgacattcccgacaatgcttttatcttccgatagaagttggaacggctcatgttcatctgctctgcaagagtatcgatggagaaattctcgtctgccaactggtcggcaatcacttcctgtatcttggcaacaaactcacaatctctctgagtcatcgcaagttctgccgaggcctgattggcattcccggacaaactaaccatcagcttatggaaagactgcctcaaccggagcaggttctcgatctgcttatgcagttgtttgatagagaatggcttctcaatatacacatcggctccgcattccagtccttccaccttagattccagcgtcgtttttgccgtcagtaagatgaccggaatatgtgaatagtcgatttccgatttcactttgctacagagttccagcccgttcatttccggcatcatcacatcactgacgatgacgtctacactctcctgttcgagtatctcaagtgccgcacgaccattcggagctttcagcacacggaaccaggcaaccaacgagtcacgcgtcagattcaacagttcgacattatcttctaccagcaatacggtgaatttctttccggagaactctgaaggaatattctctgccgaaccttcgttttcggaatgaacctcaacgatatcagcagcttcttctgccttcttttcgcttaaaggaagagataatataaacgaggagccttgcggttcgttatcttcaaggcgcaggctgccttgatgggcttctgccagagatttcgcaaaagccagtccgataccggtacctgtggcggtagcgactttatcatccggcatttggtagaaggcttcaaatatctttcccttttgggcatccggtactccacgaccgtcatcactcacatatatctcatatcccgcatcagttgtcacgagtttcaaatcgatacgcgtacgggcatattttatcgcattgcccatcagattcaccagtatcttactcaacttttcccgatcgaccattgataccagttcctgctcgggcagagtcaataccagttcaattccctttaactcggcaggactggtgaactgactatatacatcattcactatttccttaatatcgcaacttaccagattcagttgcaaagctccgttttccatcttctggaagtcgagcagctgattggtaatccctaaaagatagtttacattcttatctattacagacagatacttagcttcttttccttcatgttctatctcttgcaacttttcaagaggcaatcggatcagactgagaggggtacgtatctcatgtaccagattaatgaagaagccgatctttgatttataaacttcctgttctttagcaatctgatatttctccatccggtgtttgtacttatgcttcacgcgaagattccagcgccatgcaatccagacaatccagcccatcaacaggagaatataaataaaataggcgaaagaactacgccaccaagggggagtaatcactacccgcagagtagtcgtcttctcgttccactgatggtcattattggagccacgcacttcgaactcgtattctccgggaggcagattggtataagaagcagagttgttctcggagttggtaatccactctttatctactccttttaacatataggaatatctgtttcgtgccgggtcttcatagcttaacgccacaaaacgaatcgtgaaactattattttcataagacaaggttatcttgtcagccatataaatcggtttccccagttgaagcagcttcttcacttcctgttcgtcattcagataggataaacggatatcagtcacatataccggaggaatgtaggaattatccacaaaacgttccggctggaaaacattaaagccgttgattccgccaaaatatagtttaccttcagaagactttaaagaagaacgtgccataaactgatttccctgcagaccatcattaatcgtaaactgtcggaaatgagctttagaaatcggattaatcttaaatatccctgcattgctggatatccagaaatctcctgtctgatcttgttcaatagaatagatcaccttattgggaagcgcagaatcaaactcaataaatgcttctgttttggggtcgaaggagcataatcctcccccattcgtgccaaaccacatcacgcctttgttatcttcaaataccgtgatcaccgaattactggtaatggtggtcgaatcttcccgttcgtgctggaaatgtttccagtgtccgctcagggtattgtaggagaacacgccgctgttggtcgttgcaatccacaggttgttatacatatcctcatatatatcgcccacggaaatcatggaaccgatactggtgatcgtcatgaaattatcggcatcaggattataccggcataagccccagcttgttccaacgaagatttcccctttccggtctttatatatgcacagtacgtcattgctgcaaatggtattggggattccgcgcgagtgggtatattcctttatcgaaccggtacgcagattaagcacacgtattccttccgcataagtaccgatccaaagacaatcgccgtctaacatcaaagagcgaatatcatatttctgactctttacaccaccgatatgatattccgaaagctcccgtgtaacggtattgaagaaatataagccactctgagtaccaatccagatatttccgtctttattttcacagaatgggcctaccacctctcctgctcccgctatccccgacagataggcgggtgaatagtaatcgaaacgcttggtctgcttggacatatagttgatacctcccaagttcgtcaatacccacagagcaccttccgcatcccacatcatgccgtttatggtctgatcactcagacttcgcggatcagccggattatctgcacggaggaaggttttcgactcgcggttgaatagatagagtccattatcggttcctaccagcagttcattctccgtatatttcagcaggctgcgaactgccccgaagttcaatgaaggagccatgtaattctcaaccgttccggtttgccggttcaatctccccaacaaattgttgcctgctcccagccatacttctccctctacatcgagtacacagtttattttgtaactatcggaagagttcacgtccgatgagactcggtatgattgcagaaatttgccgttttcatcgaaacaaagcagtccttcctgtagcgaagaaacatacaccttcttcttatcgtaactctgacagacatcccagacaaaagaggtctgaatactattctgagtcaacacttcggtcttgggatcataaataaaaagtccctgccccaaggtggcaatccagagaagtccgttctccgtctttacaatcttcttgatttcactgctgacgtatacgccatactgagtagtcttgtcaaaataggagaaacggtccgttgcccggtcatagatatacagtccggagttcgttccaacccatatattctgatcttcttcaatcagtgcctcaacgaagttgttctccaatgagaatttatcgttcaatacattccgataaactttattgccccgaccgtcgtaacggttcagtccgtcactggtgcccagccagataaatccatagctatcctgtatagcacaccataccgtattatgtgacaagccatcttccacctgatatttcttgaaggagaaatagggagatgcagacaatggttcgagccagaaggccagtaaaagtatcagtatctttgttaacttcataccaagtgtgtcttatatttagattaacgattcaaccagggttccggattcaacttttctttctctctgcgtaactggaaatgcagtaccgttcgtccgttatccgcgccatcagagaatatctgtccgatagactgctttgtgctcaccgtatcgccggatttcaccgaaacggaagacagattacagtaaacggaaatataattaccatgccggatgaggacgttaaatagtccgttcaactggaacacggctgctaccttaccatcaaagatggcacgggcttgtgctcccggctttccttgtatatcaattcctttattgtccagcttcacattacggagtccttcaacggaatactgtccatagcggctggttatgatataaggtccggatataggcatcggaagttttccacgattggcaacaaagctaccggacagttcgcgatctgccttgctcatcgtaaaagcgtccaatggctccgacttcggtttggcagccgttccggttttggaggcacctttgccatttgtatccgccttcttgcgggctgccgcttcgcggcgggcttcttccgcagcacgtttgcgggcgcgttctatttcttctgcgatcaaccggtcgatacgggcattcagttgattggcctcccgtctcttcttgttcacttcgctttgcagacctttctgtttcttttgcagattagccaccagtgtacgcttctctttctcctgagcttccagtttcgccttttcgttctcacgttctttcagcagtccctctttggcggctttcacttgctgacgttctgcttttttcttccgtatctgctcctgcttctttaatatttcctctccctgcagacgctggtaggtggcatattcacgcacataacgcatacgacgataagtttgtcccaggttcttggcggagaagataaacatcagtttctcttcaatcgatttattcttatagaggtactggacagatgcttcgtacttcttctttttctctttcaggtctttttcaagactattcagctggcggttcaatgacactaattcgcgttcgatagtctccacatcgttattgatcgcaaggatataccgttttcgttcttcaatctgtcccgtcagtgccgccagtccgttcaactgactgcctacgtccttctttgtattctgtaaaatcgactccgtctcggcgatctgcttctgcagagcaccgcgcttaccttccagctcacgaatcagcttgttcgattgagcagaaagcggaattgccagccaaaggctgcttaccagaattacaaagagacgttttatcataataaagctaccagcattttcattaattcttccaaagagacctgacggtatctggaagtaacttctgtcggagtgattgaaagttctttggtcgaaaaatcataaagttgtactttcgctttctccagtttggggattcccaggtctttcccggatagttcagtctttcctccgggtttagaagcgtcagtcagcaatttctccaattgggagaactctacattcttcgataatatttctttcaattcatttttggttgcgcgtacaaaccgcttgttcatccggtcgacgaataatacttcagtaggagtcacctcgatgcgtgccaattccgtacggagaataggcatcagcaaggaaatctgtacccgttcacggctcttcatcttcatggtaccgcccactgacatacttccgcctttacccggaatcgtcagctgaagtctggaagccagatagctgggaatagctgcttcggaagcagtaacttccggcacctttgtcgccgtcagacgctttgaactcttacaacctaccaatacgactgcaatcaacaaaaaataagcgattcttttcattctgcaatgtattttttcttttctattttctgtttcaatgttttcgactcactgcccatttccagtgctttcttccagtaggtaagcgcgccgtccacatctccggtcatataatagatatctccgcaatgttctacaatcacatcactcttatcgccgccctcacttttcatggcgttatcgatgtaaatacgagcttccgcatagttccccttttcaaagagaatccaggcatacgtatccagataagtggcattattgggctcagcctttacggtcttatagctcatttcttccgctttatccagatcacgacgctctactgacagataataggcatagttgttcagtgcgccaatattggaagggttgtacaccaacgccgagtcataggcggcataagcctccttcatctgcttctgcgtatgatacatatcccccagaatagagtagaactccgaaacgatttcttttttaccgtcagccgtcttatgttccagcgctctcttgcagatgcttatcacactatccggtttctccgcctgattataggcaacagccagataataataaaattccagcgcatccggagtcgcttcaatacccggctcgcagactttgataatctgcttataatcttctttttttaccgcagcaccgatcagcatcatacgggcagcattattggtagggtccaggtcaaccacctgttccaagacggggactgactccgcctccatattcttggacaacagatattgcgcataaagcatcggaatctgaggatcatcctgctcctgcttcatgatccggtcaaacaaagcgatgatctgcgtactgtccttatcggcctgttcattttccacaatcatctgacgcatgacgcccactttggtatcaggagtcaccttcttattcagcaacagtgtatccaactgctgttggtagagttcttcctgccctgtctgtttatagtaagaagccatcgagaagatagccatcggattatcgggttccgcagccagcaccttctgataaacgtcataagcctcctgcttcttgccattctgaagatatacgtcccccaaaatgacctgataacgcatatccatcggatattcctgtaccagactttctatttcctgaaaagctttcttgtcatccttcatctgaagatagatacgaaacttctccatggataactgttcattcttgcccatgtgcttttcaagacggtttaaagtagagatgactttatcatacttttcctgtcggccatacaggtccaaaaggttgaaaagcgggtcctgcttggcagggaaacgtaccaccatctgttccaacagggtgatagccttatccagttcgttctgctgctgatacaaagatgccagcccctgactataccagtagttatccggcgcattcgccacagccttttccagcgcctcttgcccttgcggcacctgacggagaaacatataatactgcgaaacctcataaagcgcagaagccgcattcggatgaatatccagacaatgctgcaataatccgaaagcagacgcataatccttcttttctttcaggcgcatagcttccagaaagaaataatcatatttccgctgctgttcggacgttagcgaagactgcgccaaagcgacagctggcttttcccttgtacttttcaccgttccgcacgaaaccaatgtccatacagcaaccaaaagccatatactatttttcttgttcattttctctttttatggtacttatcctcgtcctgtatgtccgaagccccctgctccgcgttctgtttcatccagcacttccacttcctgccatactgcctgctcatgtcttgcgatcaccatctgggcaatacgttccccgtcctcgatcacaaaaggttcggaagaaaggttgaccagaataatgcagacttctccacgatagtccgcatcaatcgttcccggagagttgagcacggtaataccctttttgatggccaatccgctacggggacgaacctgagcttcaaatccttgtggaagagcaatatagattcctgtcggcaccaggcaacgctgcaatggcgccaatgtgataggttcagaaagattagcacggatatccattcctgcagataactcagtggcgtaagccggaagcggatgcttcgatttattgataacttgaacgttcataaatgcacatttactatttaacgggcgaaaatacacattttgaactgaaaattagttaagtttgcagttaaataatgtggtaacaaccaatttgcaaattgtaatcagccaaatagtaaataaaatgatgaattggaaacaactaatatcagccaaacgcttcggaatggaagagtttcacgaagaacggcaagagaaccgttccgagttccaacgggactatgaccgcctcatattttccgcaccgttccgccgcctgcagaacaaaacacaggtattcccgctgcccggtagtatcttcgtacacaaccgactgacgcacagccttgaagtatcttgcgtaggacggtctttgggcaacgatgtagccaaagcaatcctggaacgccaaccggaactggaaagttccttcctgccggaaatcggctcaatcgtatcggccgcctgcctggcacatgacttaggcaatccgcctttcgggcattccggcgaacgggctatctctacgttcttttcagaaggaaaaggacaaaggctacaggaaaagcagccggacggagagcaactttctccgatggaatgggaagatttgacacatttcgaaggaaatgcgaacgctttccgcatcctcactcaccagttcgaaggacgccgcagaggaggattcgtcttaacatattcaacgcttgcctccatcgtaaaataccccttttcatcgagccttgcaggcaaaaaatccaagttcggcttctttgtcagtgaggaagaaagctaccgcaaaatcgcaaccgagctgggactcatccagcttagcgaacaaccgttaaagtatgcgcgacacccgctagtgtatctggtagaagcagcagatgacatctgttatcagatgatggatatcgaagacgcccataaactaaagattatcactacagacgagaccaaggaactgttgatggcgtttttctccgaagaccggcaatcccgtctccgaagtactttccaaatagtcaatgatatcaatgaacagatagcctatctgcgttcttctgttatcggtctgttagtccgcgagtgcacccgtgtctttctggaacacgagcaggaaatactggcaggaactttcgaaggagcgctcatcaagcacatcgccgaaggtccggcagccgcttacaatcattgtgcggaaatatcactgaaaagaatttatcgttcgcaagatgtactggacatcgagctggcaggcttccgtatcatcagcactttgctggaattgatggtagatgccgtcaccttaccgggaaaagaaaaagcttactccgagcttttaaccaaccgtgtttccgaccaatacaatataaaatcgcccgtactctacgaaagaatacaggcggtacttgattatatatctggaatgaccgatgtcttcgcactcgatctttaccggaaaattaatggcaacagccttcctgcggtgtaactaccttaggagtaaacaccccttcgctctcacaaggcattttcagcgcatccggatgactttctataaacgtctggatgtgccggattcgcttgtcttcaaggatttcatctacagcaatcaggataccggtttcttccacatcaccaaactcatagttgatagccgtcccgaacatacgcatggtagggcttaaactcatataggcattgaccagcggcgggatattataacccagcttgcgaatctccgtattcaatatcttataatcctctttaaaggtatccttgcagaacaacgttttcagttcttcatcggaagtttccagaatcagcggttccatcggtgtaaccagctcttcccgatcattaaaatgcttcttaaggaagtacagaatcatgtcgcgtccacgacgatgatagctgggatacatggtcaccttgccaaagaagtacttcacattcggcatcaccactgtcagcgctcccaatccgtcccacagattatccaacgcaaacaggcctttactgccggcacgtgtagactgatattccagcgtcacaaaagagcgtcccaattcaatggtctgaggcagatattcctttataaacgcatccgagaaatgaaacatgtgagaagtagccagaatcggagcccccgcttcgtcaaagcgcacatccgttccaagcaaataccggtagccacctaatatttcttccgcttccggattccatacgatcaactgcttatatgggtgttccatcgtgtcgtattcgtcgatatccatcgacaggcccgttcctccacccgcagcacgaaaggcaatttccctcaaacgaccaatttcacgcatcacattaggtgcattctgatgggtaataatataaatctgattattacttttattggtcattcgcaagcgtctatcttccgtcaactctgctttcagcagttctttgctcaccggtttaataatctcttccatattcttgttatagtgttctatcagttacagtttatatacaatgtccttcacatactccgcccactgcgcaggagtcttcgatttatcgaaagtctgccagggaatcggttttccaaaagtgacagtaaaggttttgtggcggttcttaaacatctcgtccgccagatacagcatagcaatattgaatttaatacccagtgccttacaaacattcgccagattgtagaagaaatcagagtttctgccaccaaaatgaacgggaactacgtctcgcttcgcctgtatgctttttataatgaatgtcttcttccattccagatcacggatcactccgttctgacgccgcgagcaaagtcccgcaggaaacatgatcatctggtcgtcggactgaaacccggcttccaccatcttgggaaagtcctttgcctgctttcctgtcttattgatagggacacaaagtggggccaaaccgcgaaggttcatcagcaggtcattcaccagatactttactttcccgtcataatggcgtcccagcacatagccgagtgccactccatcctgtcctcccagcgggtgattggacacaaaggtatacaatccttctttcggcaggttctctatacctttcacctctaccttcgcatcaaggaactccatgcatgcttcaaggaaatccactcccagtttatctttcgattcattcaggaacacattaatctcgtcctgatgaactattttcttcagataagaaaccacaaacttagggatgtacttataatgcttcggagctttcgtccgaagtatcttatcgacatcgattaaaaataaagagtcatcagtcattcttttcaaataaaaatgatgccacaaaattaacggttcttttttattaatcgcaataatttgccagaaaatgcaggatttaagtttgcaacttgaaaaaagaacacccaaaaactatcaaatatcacctaaaaactatccgcggatagtttttcccctaaattttgtcggttcatcccctatctcattatcagaaatgccgtaaacttgcaccatcgaaaaatacaaacgaatattcactttttaaaagcaacgtatatgaaaagtttaagcttcagaaaagatttagtaggagtacaggatgagttactccgcttcgcatacaaactgacaaccgaccgcgaagaagcaaacgatttgttgcaggagacatcactcaaagcattagacaatgaggataaatatatgcccgacacaaatttcaaaggatggatgtataccatcatgcgcaatatctttatcaacaactaccgtaaagtagttcgcgaccagacattcatcgatcagaccgataatctttatcatctgaacctgccgcaagacgccggctttgaaagtacggaaagaacgtacgacctgaaagaaatgcatcgggtagtcaacgcgctcccgaaagaatatagagttccgttcgctatgcacgtttccggcttcaagtaccgcgaaatcgctgaaaagctgaacctcccgctgggcaccgtgaagagccgtatcttcttcacccgccagaaattgcaggaagaactgaaagactttcgctaaacctttaactatattatttatcaattccaagttagatatttttagtgcagatttttaattgtgttagtttaaggcagaagagttaccataccttctgccttttttactaatccatcctgtatgacacccggatgtcgagcataccgacacccgggtgttgtacgtcctgacacccgggtgtcgtgcaaacctccctcgcaaagagagaaagcctatccttcgataaaaaaaagattcttcttcaatacaaacaaaaaagcaccgcatctttccgttttcgcccactaataaagcatttcccaaaccgcatctctttcaagtaaataagcatttaacaatcggttgaaaacttatctaaaagatttttatggaaaattgtggggaattgtggggaatttcctacttttacgctctcttattataataaggtaaatgatacgttttttaggcaatattgaagtcagggcggacgccaaaggaagagtgttcatccccgctactttcaggaagcaactgcaagctgcttccgaagagagacttattatgcgtaaagacgtatttcaggactgcctgacactgtaccccgagagcgtgtggaacgaggagctgaatgagctccggagcaggctgaacaaatggaatagcaaacaccagctcattttcagacagtttgtgagtgacgtcgaagtagttacgcccgacagcaacggacgcatactgattccgaagcgttacttacagatttgtaatatccgtggagatatacgatttatcggtatcgacaacaagatagagatatgggccaaagaacgggcagaacaaccgttcatgtcccccgaagagttcggtgcagcattagaagagattatgaacgatgaaaatagacaagatggagaaagatgagttgacataccacgtacccgtactgctaaaggaaagcgttgacggaatgaatattcatccggacggaacgtatgtagacgttaccttcggaggagcagggcattcgcgcgagattctttcacgccttggagaaggcgggcgcctgctgggattcgatcaggacgaggatgccgaacggaatatcgtcaatgatccccacttcacctttgtacgcagcaacttccgctatttgcagaatttcctgcggtatcatgacatcgaacaggtggacgcaatcctcgccgacctcggcgtgtcctcccaccatttcgacgacagcgagcgtggcttctcattccgttttgacggagcgctggatatgcgcatgaacaaacgtgcaggactaaccgccgccgacatcgtcaacacatacgaagaagaacggctcgcaaacattttctatctgtacggtgaactgaagaacagccgcaaactggcatccgtcatcgtaaaggccagaaacggacagtctatccggactatcggtgagtttctggaaatcatcaagccgcttttcggacgcgaacgggagaagaaagaactggcgaaagtatttcaggcactccgcattgaagtgaatcaggaaatggaagcactgaaagaaatgctggcagcagccaccgaagcgctgaaaccggggggacgccttgtagtgatcacgtatcactcactggaagaccgcatggtgaagaatataatgaaaacaggaaacgtagaagggaaagcggaaaccgacttctttggaaacctgcaaactccgttccggttggtcaacaataaagtgattgtccccgatgaagcagagatagaaagaaatccacggtcgagaagtgccaaattacgaatcgcagagaaaaaataatctcagatatggaagaagaagcagtaaacaaaaaagcagaagagggcaaaaagaaaaaacgcacctcattgaaaagtattctgggaggagatatcctcgccacagactttttccgccggcagacgaagctgttggtgctgattatggtattcatcatcttctacatccataaccgctatgcgagccagcaacaacagattgagatcgaccggttgaaaaaagaattaatcgacattaaatacgatgcgttgacccgtagttcggagttgatggagaaaagccgtcagtcacgcatcgaagagtatatatcaaacaaggaaagtgatttgcagacctctaccaacccgccttaccttattaaataaggtgtaagtggagagtcttaaaagagaataagcactgtggcagtaaataagaaaaatataatgacccgttacttctttgtcattctgatcatggcattgataggagtagcaattgtcgtcaaggcaggcgtgaccatgtttgccgaacggcagtactggcaggacgtagccgatcgtttcgtaaaagaaaacgtgacggtgaagcctaaccgtggaaacattatttcttctgacggtaaactgatggcaagttcactgcctgaatacagaatctacatggactttatgtccggtgaaaaggacgaaaaaagaagaaagaaggatcaggcacgccgggattccatcctcaaagccaatatggattcgatttgtatcggactgcataagatattccccgacagaagtgcggcacaattcaaggcacaccttcaaaaaggacgtcaagccaaaagccgtaactatctgatctacccgaagcgtatctcttatatacaatataaagaggtgaaacgtctgcctgtcttctgtctgaaccgctataagggaggattcaaggagttggcatataatcagcgcaagaaacctttcggctcattggcagcccgtaccctgggagatgtatatgccgatacagcccaaggagcaaagaacggtatagaactcgcgttcgatacgattctgaaagggcgtgacgggcttacccaccgccaaaaggtgatgaacaaatacctgaacattgtcgatgtcgccccgatcgacggttgcgacctgatcactaccatcgatgtaggtatgcaggatatttgcgaaaaagcattggtagacaagctgaaagaattgaacgccaccgtgggtgtagtcgtattgatggaagttgcaaccggagaggtgaaggctatcgtcaatatgacgcaaggcagagacggtgaatattatgaagtgcgcaacaatgcaatcagcgatatgctcgaaccgggttctaccttcaagacagcctctatcatggtagctctggaagacggaaaaatcactccggactatatcgtagacaccggcaacggacaaaagccgatgcatggccgtgtcatgaaagaccacaactggcatcgaggcggatacggcaaactgactgttaccgagattttgggagtatcgtccaatgtcggaacttccagcatcatcgagaacttttacggaagcaacccgcagaagtttgtggacggactgaaacggatgagcatcgaccagccactccacctgcaaatatccggagaaggaaaaccgaatatccgcggtccgaaagaacgttatttttcaaaaacgactttgccatggatgagcatcggctatgaaacgcaggttccaccgatcaatattctgacattctataatgcaatagccaataacggagtatccatacgtccaaagtttgtaaaagccgccgtcagagacggagaagtggtaaaggaatatccgacggaaatcatcaatcccaagatttgttcggacaagacgctggcacaaatacgggaaatcctgcggaaagtggtaggtgaaggacttgccaaaccggcaggaagcaagcagttccatgtgtccggtaagaccggaacagcacaggtttcgcagggagcagccggctacaagacaggaagaaccaattatctcgtcagcttctgcggatacttcccatcggaagagccgaagtacagtatgattgtttcgatccagaaacccggtttgcccgcttcgggaggtttgatggcaggtagcgtattcagcaagattgcagaaagagtgtatgccaaagacctgcgcttgccactcacaagtgccattgataccaatacggtagtcatcccgaacgtcaaggcaggagaaatgagggaaacgcaacgggtgttggaagaactgaatataaagatacagggaaaaatcaccgattcgggaaaagaagtatggggaagcacccatcctgctcctcaggcggtagttcttgaaagccggggtatcatgcagaacttcgtgccaagcgtcataggtatgggagcgaaagatgctgtttatctattggaaagcaaaggattgaaagtcaatctggtgggagtagggaaagtaaaaagccagtcgatagccaacggcagtgttgcaagaaaagggcagacgattacgcttacgttgcattaagaattaaattaagtaggacagatatgttattaaacgagttactgaaagcaatccagccggtgcaagtgaccggagattcaaggatagagatcaccggagtcaacattgactcccgtctggtggaagccggacagctgtttatggcgatgcgcggtacgcagaccgatggtcacgcctatatccccgctgccattcagaagggagcgactgccatcctctgcgaagatttaccggaggaacccgtagcaggaatcacttatatccaagtgaaagacagcgaagatgcagtaggaaagattgcaacgacattctacggtaatccgacttcacaattcgaactggtcggtgtgacgggaacaaatggcaagacaaccatcgccaccttattatataatacattccgctacttcggatataaagtgggattaatctctactgtctgcaactatatcgacgatcagccgattccgacagaacataccacccccgaccctatcacgctcaaccgcttgttggggcaaatggcggacgaaggatgcaagtacgtctttatggaagtcagttcacattccatcgctcaaaaacgtatcagcggattaaagtttgcgggaggtatcttcacgaatctgacgcgcgatcatctggattatcacaaaacggtagagaactatctgaaggcaaagaaaaagttctttgacgatatgcctaaaaacgctttcagcctcaccaaccttgacgataagaacgggctggtgatgacacaaaatacacgttccaaggtctacacctattcattaagaagcctcagcgacttcaaaggccgggtcatagaatcccattttgaaggaatgctgctcgatttcaataatcatgagctggccgttcagtttatcggcaagttcaatgcatccaatctgttggcggtatttggagcagccgtattattgggcaaaaaagaggaagatgtacttcttgcgctcagtacgctccatccggtagccggacgtttcgatgccatccgttctccgaaaggggtaacggccatcgttgactatgcacatactccggacgcgttggtgaatgtattgaacgccattcatggagtactcgaaggcaaaggaaaagtgatcaccgtagtaggtgccggcggcaaccgcgataaggggaaacgccccatcatggcaaaggaagcagcgaaagccagtgaccgggtgattatcacatcggacaatccgcgttttgaagagccacaggagattatcaacgatatgcttgccggactggatgcggaagatatgaaaaaaacgctcagcatcgccgaccggaaagaagcgatccgcacggcttgcatgcttgcagaaaaaggagacgtgatactcgttgccggaaaagggcacgaaaactatcaggaaatcaaaggagtgaaacaccactttgacgacaaggaagttttgaaggaaatatttaattgacaacatattattatttgcaatagacagcatcttatcaagcgtggggcaacaatgagaaactgtaaattgcaggctataaattgtaaatagaaaagagatgttatactatctgtttgaatggctgcacaagcttaattttcccggagcgggaatgttcggttacacctcattccgtgctttgatggctgttatcctcgcattgcttatatcgagtatatggggagacaaattcatcaatctgcttaaaaagaagcaaatcacggaaacacagcgtgacgccaagaccgacccgttcggtgtcaacaaagtaggcgtaccaagcatgggaggtgtcatcatcattgtagccatccttataccttgcctgctattgggtaagctggataatatatacatgatattgatgctgatcaccactgtatggctgggatcactcggttttgccgacgactatatcaaaatattcaagaaagacaaggaaggcttgcacggtaagttcaaaatcatcggtcaggtgggtctggggctgattgtaggcttaaccctgtatctgagtccggatgtagttatccgcgagaacatcgaggttcatacaccgggacaggaaatggaagtgattcacggaaccaatgatttaaaatctacccaaaccactattcctttctttaaaagtaacaacttagattatgccgacctggtgggctttatgggcgaacatgcacagacagccggatggttcctgttcgtgatcattacgatcttcgttgtaaccgccgtttcgaacggggctaacctgaatgacggcatggacggtatggcagccggaaactccgccattatcggtgccacgctgggaatactggcgtacgtatcgtcacacatcgaatttgccagctatctgaatatcatgtacattccgggatcggaagaactggtaatctacatttgtgcctttatcggtgcattgatcggtttcttatggtacaacgcctatccggcacaagtattcatgggagacacaggcagcctgactatcggtggtatcattgccgtatttgccattatcatccacaaagaattgctgataccgattctctgcggtgtatttctggtagagaatctgtcagtcatactgcaacgcttctactataagataggtaagcggaagggagtaaagcagcggttgttcaaacgaactccgatacacgatcatttccgtacttcgatgagtctggtagaaccgggatgtacggtgaagttcacgaagcccgaccagctgttccacgaatcaaagattaccgtccgtttctggattgtaacgattgtactggcagcgataacgattattacattaaaaatacgatgagaacaaacagactgcccaatgcaggatatttgtaacattaatatagttgagagtattaacccgattattaactttaaaaagatgtgcgcagccgacgagcgaaaaaggaaggatgaaaaggaagagagaagcgtctgcctgtcggacagcaatagcacattactgtaaatgaaaagaattgtaattttaggagccggtgaaagcggcgctggtgcagccgtactcgccaaagtaaaaggatttgaaacatttgtttcggatatgtccgctatcaaggataagtataaggaccttctggacagccaccatattgcctgggaggaaggacatcataccgaagaactcattctgaatgccgatgaggtgattaaaagccccggtatcccgaatgacgccccgctgatcctgaaactgaaagctcaaggcacaccggttatctccgaaatcgagtttgccggacgctataccgatgcaaaaatgatctgtatcaccggttctaatggaaagacaacgactacttccctgatctaccacatctttaagagtgcagatctgaatgtaggactagccggaaatatcggcaagagcctggctttgcaagtagccgaagagcatcatgactattatatcatcgaactcagctctttccaactggacaatatgtataacttccgtgccaatattgccgtactgatgaatatcactccggaccatctggaccgatacgaccattgtgtgcagaactacatcgatgccaaattccgtattacgcaaaaccagacaacggacgacgctttcatcttctggaacgatgacccgatcatcaaacaggaactggcaaagcacggtctgaaagctcatctgtatcctttcgcagccgtgaaggaagacggagccatcgcatacgtagaagatcacgaagtgaagattaccgagcccatcgccttcaacatggagcaggaggaactggcactgaccggacagcacaatctttacaactcgctggctgccggtatctcggcaaacctggcaggtatcactaaagaaaatatccgcaaggcgctctccgacttcaagggagtggaacatcgcctggagaaagtagcgcgcgtacgcggtatcgacttcatcaacgactcaaaagcgaccaatgtcaactcttgctggtatgccctgcaaagcatgaccaccaagacagtgctgatactgggcggcaaagacaaaggcaacgactatacggaaatagaagatctggtacgtgaaaagtgctcggcactggtttatctgggactgcacaacgaaaagctgcacgactttttcgaccgtttcggactgcccgtagccgatgtgcagaccggaatgaaggatgcagtagaagcagcctacaaactggcaaagaaaggagaaaccgtattgttaagcccctgctgcgcctcattcgacctcttcaagagttacgaagaccgcggtgatcagtttaagaaatatgtaagagaattataaaatggatttattaaagagcatatttaaaggcgacaaggtaatctggattatcttcctctgtctctgcctcatctcgattatcgaggtgttttcggcagcatcgacgctgacgtacaaaagtggcgaccactggggaccgataacacagcactccatcatcctgatggtgggtgccgtagtagtggtatttctgcataacgtcccctacaaatggttccaggtattccccgtcttcctgtatccgatttccctcgttctgctggcattcgtcacgctgatgggtatcattacaggcgaccgtgtcaatggggcagcccgctggatgacctttatgggactgcaattccagccttcggaactggcaaagatggctgtcatcattgccgtttcgttcatcctgtccaagaggcaggatgaagaaggagccaaccccaaagcctttaagtacatcatgatccttaccggactggtccttttgctgattgctccggaaaacctgtcgacagccatgttgctgttcggtgtcgtattcatgatgatgttcatcggacgggtagcggcaaagaaactccttctgttggcaggaggacttgtgctgattgtcgcactcggtgtaggtacggtagtcgccatccctgccaaaacactgcacaatacccccggacttcatcgtctggagacttggcagaaccgtatcaaaggcttttttgataaagacgaagtgcccgcagccaaattcgatatagacaaagacgcacagatcgcccatgcccgtattgccatcgctaccagtcacgtagtgggcaaaggaccgggaaactccatccagcgtgatttcctcagtcaggcattctccgactttatctttgcgattgtcatcgaagaaatgggattgataggaggtatatttgtcgtattcctctacctctgtctgctgatgcgggcgggacgcatcgcgcaaaagtgcgaacggacctttcccgccttccttgtcatgggtatcgctttgctgctggtatcgcaggcgatactgaatatgatggttgccgtgggactgttccccgtaacaggccagcccctgcctttggtcagcaagggaggtacaagtacactgatcaactgcgcttatatcggaatgatattaagcgtgagccgatataccgctcatctggaagaacagaaagcgcatgatgcacagattcagatgcagatagaagccggaacagctacttcagaagcacaagccgccgccgaacctactgcacagattctgaacagcgatgccaagtttgaggatgaacatgatagcagtaaatgaagatgaacggatagaaaaaaggattattatggagaaagaacttagaattatcatcagcggtggaggcacaggaggacatatcttccctgccgtatctatcgccaacgctataatagagctgcgaccggacgcgaaaatcttatttgtgggagccgagggccgtatggagatgcagcgggttcccgatgcaggctataagattatcgggttaccgatagccggttttgaccgcaaacatttatggaaaaacgtatccgtactgatcaaactggcacgaagccagtggaaagcgcgcagcatcatcaaaaacttccgcccgcaagtagcggtaggcgtaggaggatacgccagcggaccgacactcaaaactgccggaatgatgggagtgccgactctgattcaggaacagaactcgtatgccggagtcaccaacaagttgctggcacaaaaagcaaagactatttgtgtcgcttatgatggaatggaaaagttctttcctgccgataagattataatgaccggaaatcccgttcgccagaatctgacgaaggatatgccggaaaaaggcgcggcactgcgttcctttaatctgcagccggataagaagacaattctgattgtaggcggtagccttggcgcacgtaccattaacaatacgctgaccgcagccttagctacaataaaagaaaacaacgatatacagttcatctggcagaccggaaaatattactatccgcaggtgacagaagccgtacgggcagcaggagaacttccaaatctgtacgtgacggacttcatcaaggatatggcagccgcttacgcagcttccgacctagtgatttcacgtgcgggagccggttctatttcagagttttgtctgttgcacaagcctgtggttctggttccttcgcccaatgtggcagaagatcatcagaccaagaatgcactggcactggtagacaaacaagccgccatctacgtaaaagacagcgaagcagaagcaaagttgatggacgtagccctgaacacagtagctgacgaccggaaactgaaagaactaagtgagaatatagccaagttggctttgcccgactctgcacgaatcatcgcgcaggaagtaatcaagctggcagaagcagaaaactagttgagggaatgcaaaaatcgcaactatcccaattaggattgactaaaaagtcagtagaatctccaatctcctccttccagaaggaggagaatgaaaatactaccgacttttgggggcatccccaattaaaggtagtaccgactctgattaaaacttgaaatgttacttggaacaagaattataaaaagaaacagtataaagaaatgaatattgaaacgatcaaatcagtctactttgtcggtgccggaggcatcggtatgagtgcgcttgtccgctatttcctttccaaaggaaaagtggtagccggatacgaccgcaccccgactccattgactgaaaacctcatcgccgaaggcgcacaaatacattacgaagaaaacgtccgactgattccggaagcctgcaaagacaaagaaagcactttagtcgtattgactcccgccgttccgcaggaacacgaagaattggtttatttccgcaacaacggattcgaaatacaaaaacgcgcgcaagtactgggaacgatcactcattccagcaaaggtctgtgtgtagccggcactcatggcaagacgaccacttctaccatgaccgcccacctattccaccaatcacacatagaatgtaccgctttcctcggaggcatctccaagaattacggcaccaatctgctgctctctcagaaaagcccttataccgtcatcgaagcagacgagttcgaccgctctttccattggctgtccccttatatgtctgtcatcactgccacagaccccgatcatctggacatctacggaacagaaaaggcatacctcgaaagcttcgaacattatacaacactgatccagccgggcggtgcactgattatccgaaaaggtatctcactacaaccgaaagtacaggccggagtccgtgtctatacctattcgcgtgacgaaggagacttccacgccgagaatatccgcatcggaaacggtgaaatcttcatcgacttcgttgcccccgacacacgtatcaacaatatccaactgggagttccggtaagcattaacatcgagaatggtgtagccgccatggcactcgcccacctcaacggagtgaccgacgaagagatcagacaaggaatgaacagcttccgcggtgtagaccgccggttcgatttcaagatcaagaatgaccaggtagtctttctgagcgactacgcccatcatccctctgaaatcaaacagagcgtgctgtctatccgcgaactctataaagacaagaagatcacagccatcttccagccgcacctgtacacccgtacccgcgacttctatcaggactttgccgatagcctgtcactactggacgaagtcattctggtagacatctatccggctcgtgagacaccgatccccggtgtcaccagcaagctgatatacgacaacctccgtccgggcatcgaaaaaagtatgtgcaaaaaggaagaaatactgaacattctgaaagataaaaacattgaagtattaataactctgggagccggagacatagacaattatgtccccgaaataaagaaagaactggaaaaaatgaagaacgaagagcgaagaacgaagaactaagaatttctacgctacatcatacagtcgcgcagccaattctcaattcttcattttcaattttcaattctcaattaaataaaaactatggtaaagagaatccttctatctatcgtcatgttgatgcttatcgcctacctcggcatagccatcaccgctttcaaccgcaagcctgccaaccagacctgccgtgacgtagaactggtcatcaaggataccacttatgccggcttcatcaccaaagaagaagtgaaaggcatcctccagcataaaggtatctaccctatcgggaaaaagatggagcgcatctctaccaagtcgctggaacgggaactgagcaagcatccgctgatcgacgaagcggaatgctacaaaacacccagcggcaaagtctgcgtagaagtgacacaacgtataccgatattacgcatcatgagtgccaacggagagaattattaccttgataataaaggaaccgtcatgccgccggaagcaaaatgcgtcgcacatcgggcaattgtcaccggaaacgtagaaaagtcgtttgcaatgaaggatttatataagtttggtgtatttttgcaaaacaataagttctgggacgcccagatagaacaaatccatgtgttgcccgaccgcaacatcgaactggtacctcgtgtaggcgaccacctcgtctatctcggcaaacttgaaaactttgaaaacaaactggcacgcctgaaagaattctaccaaaaaggactcaatcaggtaggctggaacaaatattcacgcatcagtcttgaattcagcaaccagattatctgtacgaagagagagagtaataggtaataggtaacaggtgatgggatgaagttctcaaaatagaaagttgaaaataattaaattataaataaagagatggcaacaacagaatttatcgccgctattgaacttggttcatcgaagataaccggtgtggccggaagaaagaacagtgacggaagtatgcaggtactggcatacgcccaggaagactcttcaacgtttatccgcaaaggagtgatcttcaatctggacaagacagcacaaagcctgacttctatcatcaacagactggaaggtgagttgaaaaactcaatcgccaaggtatacgtaggcattggcggacaatccctccgcacagtccgcaacgtagtaagtcgcgacctcgaagaagaagcgattatctcggaagagctggtaaacgctatcggcgatgagaacgtagcgattccggtagtcgatatggatatactggacgtagcgccgcaagaatacaaagtcggcaataatctgcaagccaatccggtgggactggtaggaagccacatcgaaggacgtttcctcaatatcgtcgcccgctcttccgtacggaagaatctggaacactgcttccagcaggcaaagatcgatattgccgaccaactgatcgcgccactggtaacagccaatgccgtgctgaccgagagcgaacgccgttcgggctgcgcactcatcgacttcggagctgataccaccactatttcggtttataaaaacaacattctccgtttcctgacagtactgccgctgggaggaaacagcatcacccgcgacatcaccaccctgcaaatggaggaggaagaagcggaacgtctgaagaaaacttacggagacgccctatacgaagaagacgaaagcgaagagcccgccacctgcaagctcgaagatgaaagccgcacagtcgaactgagcaagctcaacaacatcatcgaggcacgtgccgaggaaatcatcgccaacgtatggaaccagattcaaatctccggctacgaagacaaactgctggccggcatcatccttacaggaggcgcagccaacctgaagaatctggaagaaatgcttcgcagacgctcgaagatagaaaagatgagaatggcgaaactacctcgcaacaccgttcacgctcccagcaatatactgaagaaggacggttcgcagaacaccctattcggacttctgttcgaaggcaaccagaactgctgcctgatagaaaccgctccccagataccggtcactcccgccactccccgaccggagccggaaattcacaagaccgtagatatgtttgaggacgatcaggaactgaaagagcaagcccgactggcacgcctcaagaaagaagaggaagagaaagaagcacgggcagccgccaaggaagctgaaagactccgcaagcagaaggagaaagaagagaaagaaagacgcaagagagaagccggtcccagctggattcaacgcaagatcgactccctgaccaaggaaatcttctctgacgatgatatgaaataaattcaaaattcaataatatggacgagatagtacaattcgatttcccgaccgactcaccgaaaatcatcaaagtaattggtgtaggtggcggtggcggtaacgctgtgaaccacatgtaccgggaaggcatacatgacgtaacgttcgttctctgcaacacggacaaccaggcattggccgagtcacccgttccggtgaaactgcaactgggccgtagcatcacacaaggacttggagccggcaaccgtcccgaacgggcacgcgacgccgccgaagaaagtattgacgatatcaaagaacagctgaacgacggcaccaagatggtattcatcactgccggaatgggaggaggaaccggaaccggagccgcccctgtcatcgcccgcattgcgaaggagatggatattctgacagtaggtattgtcaccattccatttattttcgaaggagaaaagaaaatcattcaggcactggacggcgtcgaacgtatcgcccagcacgtagatgccctgctggtcatcaacaacgagcgcctgcgcgaaatatatgccgaccttaccttcatgaatgctttcggcaaggccgatgatacgctttccatcgccgcaaagagtatcgccgagattatcaccatgcgtggtacggtgaatctggactttgccgatgtgaagaccatcctgaaagacggtggtgtagccatcatgagtaccggattcggagaaggcgagaaccgtgtcaccaaggctatcgatgatgccctccactctccgctgctgaacaacaacgacatcttcaatgctaaaaaggtgatgttgaacgtatccttctgtcccacgtccgaactgatgatggaagaaatgaacgagatacacgagttcatgagcaagttccgcgaaggtgtggaagtaatttggggtgtcgccgtagacaactctctggacaccaaagtaaagatcaccgtactcgccaccggatttggtgtagaagacgtgcccggtatggacacactgcacgaagcccgcagtcaggaggaagaagaacgccagttgcagcttgaagaagagaaggagaagaacaaagaacgtatccgcaaggcatacggtgaaagtgccggtatcggaaagaaaagcctgcgcagccgtcgccatatctatatcttcaataccgaagatttggacaacgacgacatcatcgccatgatagaggaatctcctacttacacgcgcgataaaacgaagctgttgaagatcaagacgaaagcggctcttgaagaggaagttgccatggaagaggctacggacaatgacggagtaatcactttctagatggttcttccccttgctattacaaattgtaaataattaaaatataaatatcatcatggatttatttgacaaagtcagcgaagacattaaaaacgcaatgaaggcaaaagataaagttgccttggagactttaagaaacataaagaaattcttcatcgaagctaaaacagctccgggagccaacgatacactgacagacgaagcagccttgaaaatcattcagaaactggtgaaacaaggtaaggactctgccgaaatatatatcggacagggacgccaggatctggctgacggagaactggcacaggttgccgtaatggaagcttatttgcccaaacaaatgactgctgaagaactggaagctgcattgaaggaaatcattgccgaaacaggtgctaccagcggaaaagatatgggtaaggtgatgggagttgcctccaagaagttggcaggactggcagaaggccgtgctatttctgcaaaagtaaaagagttgttgggataagcccccacacctcctcccagaaataaaaaaaactttttggtctcacggtctcattccattaagataagccgtagataatcagcaacataaagagtgagagatccttttcaagcaggtgtctctcactcttttcttcattcaaacagctatttttcacatatctctcattcacttcaagggtatctctcattgtttttaaggctttatatgttatcctgatacctatatccttctcttttgatacctacatctgcatgttttcttaccgagatcttcatcgttccacccgggtaggacgaactgtctactactgtgacacgatcagttcacctaagtgcgataatcatatcacccgggtagaacgatgaagatatcggtgagataatatgataataccaattgaaagacaggaaaacataggatcatttgcatctaaaagagcggtaaacaataacttcttgatttatgaaattacctatttgacatcaagttacaagaataaaaacataataaatggcattatataaattaaattcttacttttgtaacaataggaagataacattcctgctttgacgacaggcaaaacattctttttgaatagtttctacaacgaactaaattacgacaaacagatgaaaagcagtacattgataactattctatctacattcttattagtagggtgcagcaaacaacaatccactttggacaaacaactggatgaggttgaaaaaatcatagaagtaaatcctgatagcgcatcaagcatactggaaaacatagcatctccggagcagctggatgataaaacctttgcacgttggtgtatgttatcgggcaaagtcactgacgaaatctttaataccctattgccatcttatcaattcgagcgagctaacgcttggtattcatcctacggtaaacccaatgaacaagtacaaatcttaatttatttaggacgttcctatgcaaatgacggggattatgacaaagcaatgtctatatatactaatgcgttagagattggcgaaaagaataaactctataatttagttgggtatacatatagctatataggcgacttatatagagagaaagccatgcgaacagaagctatcaaaaaatacgaaatggctgccgacaatttcaaaaaagaaaataacactgatagctacgcttgtgctctaagagacatgggacgtgaatatgcaagtattgattcgttatcacacgctatagaaattctatctacagcggactctcttacagcaaactccaaggacatagatgtaagagctgccatcgacaatgctttaggaaatatctatgtaatgcaaaacaaatatgatgaagccaaaaaattcttctacaaagcactggaaggaagagaaaaaatgcctaactacatggcattaattgatctatacatagcgtctgactctataagccaagcaaaagggctgctacagaagattccacaagatgatcctacctatacttatagtattaaatatttgtattaccagatatacaaatcggagaaaaaatatgagaaagcactcacttatctggaagaatgtacagacttggtagattccattgtatatgcagataatcaatctaagatactaaacatagaatctaaatataaccacttgaaaattagcaaggaaatagataaattaaagatgaagcaacaaagctacattatagtttctgttatctgcattgcagctctactattaatggttataggatatttattatacagaaaacaagcaaaagagaagatactaaagcagcaaaaagaattagataagatgaaattagacctatacacactttctcttgaacttgaaaaaaaacgaagtttattaaacacattcaaagaaaaagacgaaaattatgataaaatgcaaaaagaaatagatcacctattcactaattacaggaaattacagaacaaaatattaaccgattctcctttatataaagaacttgtttctcttgctaataaaaatacacctagaattacagaaccattgataagcaaaaatcaatggaaactcatagttaacgaaataacaagtatttatcccaacctttacaattatttatttagcttatgcccgactttatcagacgaagattttcaatattgttgtttctacctatatggattcgacactaatgtagaagcaaaattattaaatattgccattggctctgtaagtagaaagcataccaggcttaaaggaaaactgaatataacactaccaagcaactcaactttatatgaatacttgatgataaatatggggtagctttcatgtttatatgaacattttgtatctgtcacactgatggtacacacaaaaagcataaccagctgattatcaagcaccacttgtccatgtcaaaacaatcattttactaaatgtagatctctatttttcataaatttgcagaaaacatttagacatatgagaaagttaagcattacactattattaattggcatttcattcatgacaatggaagccaataattattcaacagaccacaaaactcgaatctattttaagaagtggaatgaacgccaaaagacagttatttttttacctatagaagctactatagaagaaaataacattgaagtgcagttttttgaaaaatcgaacgagccagccaccttccaagttaaagacaaaaatggaaacattgtattccaagacgtggtgattcctgataagctagaaatctatcaaatagatttagatggctttaaagccgatcaatatgaactactttatatagaaaaagctgtgactttcattggagagtttgaaatcgagtaggtaaaacctcagctcataaaataatattaactaaaaattataccatgagaaaactattaattatcgtatcattgtttacaatgatgtcatgtcaagagaatcttggtatgattgacagtgaaaacttaccggaaacaagtagtagcatgaaccctgaattcaaagttaatgaagaagacattcaatcgactattgatgagttttatggagtatcctctctctctcctacaagggtagagaattctgttagtataaaaaaaataacttcattgactaaaagcaagacacgaaatattggcagtgactctgatatagatgtgaatgacattctttatatagtaaagttatctaatggaaatactgcttttgttgcagctgataagcgtgccaaatcattatatggcattgcagatggaaatgtagagcttgacaatactgatctcataaacagcaacatacccggtggattagttgccattttaagcaatgcaatagccgatattaagtattctataaaatacaatactgaagttaatgacgattggaaaacggtaaacgtttccacaagggcagactcagatatagttggaggaaaagaaatgtttaccatggagccaaggtgtccagtttcttggcatcaattcgctccgtttaataatgcatgtcctctatataccaacagcaatggagataaagtacactctgctgcgggatgcgttgcagttgcagcagcacaagctctattatgtttatgggaccgttcaaaaactactttttattactacacattaataacatcatgggatcggctaagcgaaataaaacatgacaatcagtttattgccggaagtgatgaagaaactgatgtcgcaaatttaatacatgaaatcggacaagcagtaggaatgaagtatggaccgagtagtagtgcgaatacagaagatgcagtaaaagccgtatgccttttatcacaaggttatcttaaatatgaaaggtccccttttaatgaaactattgaaaatactttaatacagaaaagtggtatagtatggttatctgccagaaatagtaatgacgaagggcattcaatgctaatagatgcattacgtttcgtatttactactggggcttgtggcacatgcatagatgcaacaaaatatgtaaagagatatttccatatcaattatggatggggggaaagttataatggttattatctttatataccacagtcagataattatgatcaggatttgagatgggaaggcacatctagaacctttccatatcaaatgaaagcattcagtgtatggcaaacaaaaaatgaataaaatgaaatacaaattaaccatagttgtcctttatatgatcataagttcgtgcaataatactgattccaatgaattcgctttctctaactatagttgggaatgccccaaagaaggaggtaaggaaatattcacatccaataaagaagaatggaaaattgatcagttaatacttgatggaattattattaaagaatatagtccagaatatattgataaaaatcagagttttccacctgacaaatttgaatttgattttttctcttttaaaatcgaaggaaagaaagttactatttgtatactagaaaacacaacgggaaaaagtagaagcataaaatttatatgcagacatgtaaatacatatcatactataactgttgtacagctacctgatatcaatatcattgaacactctggaaactaaaagtttcgatgaatatgtattatatagttggcataacagtaatacgaagagtattctcttaaaaagataaaagatcaatcaaaagacacattaattaaacaatctaataataagtaatcatgaaaacaacaaaatctaatattctatcaggacttacctatactttatcagtaataggttgtctatttgttgcttcgtgtgcagataatgggaattatattgaaaaagattcgagtataaaatctgagtctgataattcaaaatatgacgaaaataactatagttttaatactataaacttatggggtagtgaagcggctgtagttgacaaaggagactactatatttttcaaggtgacattcacttattaaaagaagatttaatccaaaccagaggtgctgccagaatagatcgtagatggcctaacaataaagtttattattctgtggacggtattccggctatatatacaaagtatatatacaaagcaatagaatggattgagaatggttcatatatcgatatggtaccccgttacaatgaaggagactatattcaattcaattttttggatcaaaatgaatggtcagcatattccgattatgtaggcagaaaaggaggcactcaaaatataggactatcccgggaagcaattataagcgttggcactattgctcatgaaatatgccatactattgggatgtatcatgaaatgagcagaaccgatagggacaattacatacgtattaattttgaaggtatggatgaagatacacgatatcagtataaaacttatgccgaaatgaatcagaatggagtaaatgtaggaagtttcgattttggttctataatgatgtattcttctgggggagtcatgtacaaacttgataatagttacataagatcacaaagagatagtctatcaaatactgacatgttaactctggcaacattacaacctataggagaccaattcaaatttttcgatccatacggttataatgaaccttacgacagcgattatgaatatagaaggaccaaaatcatacaatgtcctgaaggggctaagatagacttcaaatttcaatataattataaacctacatcatctaacttaggcggatatactgtagacgattttaatgtcagaaccataatctcaattatcaatagaaatactaatcaagaagtttattcaaaagaaatcccccttggcgtcactacaacatggacagatatctatttaagaggtatcaatataccacaaggcggattcactacaaaggtaacattaataggttcagtgaaggggacatctacctctgataaattaaatgctctaaaaagagttatgtacaatccaagtgtatatttgcatcttgataaagttgaaataaaaggagtaaataaacatattcccaatgaatttggaaatgatgatagaatctttacgttcatatcaatatgataaacaggatatataacacttttgtatttttaatcattataggtttatgcttttattcttgtaatgacgatgagaagcaaaaagaaaaatataaaataatgactctaaaagtcgcagcttatagagattattatgttgcaccagagcatggtataactaccaatatattgggttatgttgttacggatgaaaacaacaagacatacatcatcgaaacaatcaaaggttttgaagatgagtatgaagaagggtatgagtttgtgattaaagtcaaagcagtaaacaaaaatcaaggcgaaccggtacaagatctattgggatattattattatctattggaagtattaagtaaggagaaagtttaaggcgctgattagaaaactggtcatataaaaaatcctctatgaattagcagtagggagtggtagctttttatcactcccttattggactattcgttttttattataatattgcataatcataaataactgcatgtcgacatatattcatctacataaagaagccattagaaagatatgagactagatcaaactaaattattagattttctattcacagctttcatcctaattggctgcaaagaaaacattgataccagctcatgtctaaactgtttttttccaaaatatgcagttattttttcgtagcttactgttcaagccttacaccgataacacaaaaacagtgcaataaactttatacgtcctaagtttatatttttaccaaaatatatttgcagaatagatactaattctatatctttacttttgcccctatcttagtgcacttcatagtcaagagattagttctttaatactacaaagtctctaaaaaacaggattttatacaaaccttcaaattagttatatggatatgataacaaaaataatttcggagaagaaacttttttggataagtttcgccatagttgggtatttttgtttattatatttaaatgcttacttcgcaaaatccgacttagttttcatagggtgggttcaagaactactaacgataccatttatactttttcagtttatacttttaatcattgcgattttgtactgcattaaagaaacatttcgaataaacagatattcgttttggagtttttttattttattgataaataatctatttgttatctgtagtttaatcttcagataaatatagttcaaaagcgaagtgtttcttgaaaactacagcccctttcaccgcttatcgtgaaatctatatccaatccccagcattagattgttagggtctttaaacttactcaactgataccccacgtgcaaaaacaaatggcgggtaacataagttttgagagccaaaatttgatagaaaccttccgtatcatcgccactatatatcatatttcgtccgataccggcattgatggagaaaataggcatcaccagttctgcccgaagagacaaccccaccgcaaattgttcgcggaatggaggacgatgaaactttatatcgtctccataagttcctactagtttatagtccttaatattagcactctcgtcaaattgcgcatccacagaaagtcctgcccggaaatagttattgaaattatacatcggggcaaaattgagaccaacgataccgaacgaaccgggaaccaaagtgggtatcccttctttaacgaatcctcttttgcgagtggcaccgtataccaacaagtcatagctgacgtgtggctttatgtaaaggcgtttgggagcaattgctccggacgccttatcttcggcattaaaggtacgtacaatgccgactcttcctccgattgtattgagacctccattgggataacgcgtatttccattggagaaatgagtgaagtccacacctgctgctagtttccactgtggataaaactgccagttcaagacaaagcccaaattgatatacgcattgattttagaaccgatagcgtcattgtaccaattgctatgttcgtcatattgtttccaaccgaaagaagcaccaaaattccactcataatccaacgacaaacgggatgaaagccgtacaataggcgccccttgaaaagcatataccgccaccggatttcccagttcagcggaattataaaatgtattatgcgaaacaccgatgccctgataagcatgaggatacagcttccccaaataggaatctttgctgaactggaaagcatacttcaagtgcagggaaagtgaccgatcgattttctgccgttgtgcattatcgccttcaaggaaactgtttgtcggagctacatagcccggacgaacgtcaaaaccgatctgatggatgagggcatggttggcgctgtcattctcttgtcggacaggtttcactactgtctgagcatccaatttgcagccgactgctgagagcagcagcaagcagattatatacagagaccgtctggtattcatatttctactcatttgatattctcttgtttaacgtagttatccgtaggtatggtgctttgaaacataccagttatgactcgttgcttcttggtcttaggatgaatggcataaagggtatattccgtttcaaaccattcatactcttgcattaaggtgatgtgctgcgtggtattagccgggataaaaatatctctatatatatcgggaaaaggaaattcttgctccatagaagtatattgcgcctgtaccccgttcatcaccaaagacccattctctatgcttggtatctctactgtcagattaccatctcccagtagttggaaagcctcggacgtatcgcttctgaacgttactttatggcgaatcccttgtactatcaagtgcaatggagagggagtattctcaaaattagatcgtacaatattcacttcttcctctatttttctttcactataatacgcatttaaagaataagaaatatggtcgaacacatatttgtccgacggagtaatttgaacatatatttcttgtgattcatactcattactcactacaagcatgaatctaaagtagtcgttgcggacgttttcgcccactgttatctttagctctttggggttactgcgttgaataatgaaatcggtcagcttttcattgcatacaatcttacctaatcctttcaggtaggcatcctggtttctcattatcagattgtcgtcggcatcataaacttcatattgatgggtaaagtcactatcgtaagtatacatccaaaccaaatcccaattggaggatgcaaaacgaatagttacctcatcaccattcccgtccaaagtaaattcggtatcggaagtccggaagtcgtcgacgaatacatcatcgttacaactataaagtcctaatagaataagaatatatgctgttaagtttacgattgttttcatgtcggtcgttatctagttattttgttgacgacaaaagtaatacatatttttagaagagagttattatctaccctgttttagttgccacataaaggaaaataaactatttttgttctcaacattaaagagggagcaattatggatgcagcaataaagaaaataccttatgggatgacggacttcgagagaataattcttgaaaactattactatgtagacaaaacacaatatatcgccaaagtagaaaaagtgacctccttcttcttctttgtccgtcctcgacgtttcggaaaaagccttttcctaaacatgctcggtttatactacgacatcaaccaaaaagataaattcgagaaaatctttggtaatctttatataggcaagcatcctacgcctgatcgcaacaaatatctggtgcttacactcaatttcagtagtgtagccgccaatatggatcgtttggaagaaacattcaacacctattgcaaaatcgtaatggatggatttgcagaacgaaatgctcatctgttagggaaagaagccgttgaaaagctacatgaattaaaaacaggagatgccttattgggatcactgtgccaaagcgcccaaaacaagggacaaaagatatatcttatccttgatgagtacgataactttgccaacaatattctggtagattatggtaatgaacgttatcgcagcatcactcatggcagcggattcttccgtagtttccttaaagtggtaaaagactattcaagttcagtgatcgagcgcatcttccttacaggcgtaagcccagtaacaatggacgatctcactagcggattcaacattgcggataattatagcagtaactccgcattcaacaacatgataggtttcaacgaatacgaagtacgcgccttgatagattactacaagagttgcatagaacttccccattctacggacgaactgatagatatcatgaaaccatggtatgataattattgcttctccatagactcactggacgaaccgcctatgtacaactcagacatggtactttacttcatgaatcgctacctactgaataaacgtattcccaacaacatgcttgatgctaatatccgtaccgactacaacaagctgcgccacctcatccacgtagacaaaacttttggtgagaatgcgagcgtcgtacaagaaattgttgagaaaggctctactaccggaattatcatcgatagttttccagccgaggacatcgttaaaacaaggaactttaaaagcctactctactattacggcatgctaaccatcagcggaatggaaatgggtgagcccatactgagcgtccccaactgggcagtgcgcgaacaactttacggttacatggcagacatctacaaagattccgccgacctatatctggagacagataagctggtggaccgaatgaaacgaatggcatacaaaggagaatgggaaaattgcttcacatacattgccgaccgcttgaatgcccaaagcagtgttcgcgacttcatagaaggtgaagcttatgtaaaaacctttattttggcttacctcggattgacacattattatattgcccgtcccgaatatgaaagcaacaaaggatatgcggatatctttctgcaacctcgcctgctgcaacttcccgacatggtatacagctactgtatcgaagtgaaatatgcaaaacgggatgcttctgacaccgagatagaaaaattgctgtccaatgcaaaaatacaactgaaacagtatgcagcaagcgaatggattcatcaagacaaagggactacagaattaaagagtatcgcattagtattccaaggctggaaactggtgagagtggaagaagtataaactgctaatcaaacaattctttcagtacatccagcgactttaatgcaggaaaatccggcagatgcaaacgataataatcattcataatcgtcaggcagcgagtgcgttccgcacggctcatgccaaatagatgcatcgtctcatagttcatgcgcatcagctggcgaagacgtccagcctcttcgggattaatataagaagaatgcaactgcggacgagtggaagtgaaacaagcattcagcaaatcaaagtaatcaccggtgtgataatcttccagattcggatacaaccccaaaaaacgggaaagacgcatcagaaaaaccagatggaaattggcaaacccttcacgacattcgtccagccaaatgacagaatgctgcaaataagcgaacaacggacgattctcagcctcttcacggatagcacgatacagaaactctgccagaaaaagtgccattgaagacttgtacgggtcataaggaatggaggtaaaaggataaaaagacttcgcctcttttacccgatagagagtggcattcggacgataatccgcctcaaattcaatgaaagacaaaggctggaagagtactgacttgactgccgccttccgcgaacggggtacgggaacgagaaaagaagtccgcccggataactccgtgtacatatctacaatgatagaagtatcattatatttaagcgtatgtagaactattcctttcgtcttttgcagcataatgcactcctctttttatcattccggaacaaaactacaaaaaaatgtctggcaatcgggagctttttagaggcgttaacaacaaaaaagattgctatttttgttatactccctgaagaacaagtaaatatagacaagagtatgaaaagaaaaagtaataaaaacagctttaccggatgcgcaaaagcatacatccggaatctacaagaagagggtcgttactcgacggcacatgtatacaaaaatgcaattctgatttatacatgaagcagaaggtgcaaataatacacctggctatatctataaacactttacttttctcataattcacaactatactccttaacctttatatataataaggtgtaaatatagcacattattcatagtcttatagacgaagatatttttttcgaaaaatcgcaatctcatattttattgaaaatcaagcactatagagtcaccatacagaaaaaaagagaaaaaactacatatttttttcatgaattgtttgtcagtttcaaaaaagttcctacctttgcatccgcaatcgagaaacaaacactgattcgagagagcaaaaagcagaaatgcaacaacaggatggcccgttcgtctatcggttaggacgcaagattttcattcttgaaaggggggttcgattcccccacgggctacaagtaaaaagaataaagaactaaaaaaaatagattagtcgaaatggcaaatcacaaatcatcactgaagagaatcagacaagaagagacaagaagacttcataacagatattatggtaagaccatgagaaatgctgttagaaaacttcgtgcaactactgacaaaaaagaagctgttgcaatgtatcctggcatcactaagatgttggacaagttagctaaaacaaatgttattcacaaaaacaaagctaacaatctgaaatctaagctggctctttacatcaacaagctcgcttaataatagaaaaacaacaattctatatagcatttaggctgaacttttaagttcggccttttgtgtttataaaccattgaatatcagattactttcccattcactaattccgcttttattctgcatttttcgcctccgaaacttcgccaactcgacaattttcactatatttgctctgttattataacttagaaaggcaattatgagcgaagaacaaatcactcccaataacgggtcttattctgcggatagcatccaggtattggaaggtcttgaagcagtgagaaaacgccctgcgatgtacatcggtgacatcagcataaagggacttcaccacttggtatacgaaatcgttgataactccattgacgaggcactggccgggtattgcgaccacatcgaagtgacaatcaacgaagataattcaatcaccgtacaggacaacggacgtggtattccggtcgactatcatgaaaaagaaaagaagtcggcactggaagtagcgatgaccgttctgcacgccggaggtaagttcgacaaagggtcgtacaaagtttccggaggtttgcacggtgtaggtatgtcttgcgtaaatgcactgtcaacacacatgactacacaggtattccgcaatggtaaaatctatcagcaggaatatgaaattggtaagccgctttattctgtaaaagaagtgggtgtatcggatattacaggaacccgccaacaattctggccggatgatacaatctttaccgaaacggtgtatgattataaaatactggcttcacgtctgcgtgagctggcatacctaaatgcaggtctccgcatttcactgaccgaccgtcgggtagtgaatgaagaagacggtagcttcaagagtgaagtattctattccgaagaagggctgagagagtttgtacgcttcatcgagtcttcacgtgaacacttgatcaacgacgttatctatctgaactctgagaagcagggaatacctattgaaatagccatcatgtacaatacaggattctccgaaaatgtacattcctatgtcaataatatcaatacaatcgaaggaggtacgcatcttgccggtttccgccgtgcactgacccgtacgctgaagaagtacgccgaagacagcaagatgctggaaaaggtgaaagttgaaatctcgggagacgacttccgcgaaggtctgactgccgttatttccgttaaagttgccgaaccacagttcgaaggacagaccaaaacaaagttgggtaacaacgaagtaatgggtgccgtagaccaggctgtcggtgaagttttggcttactacctggaagaacatccaaaggaggcaaaaacgattgtagacaaggtaatccttgctgccacagcacgccacgcagcaagaaaagcccgtgaaatggtacaacgcaagtctccgatgtccggaggcggtctgccgggtaaactggccgactgttcggataaagacccctcaaaatgcgaattgttcctcgtcgagggagactcggcaggtggtactgccaagcaaggacgtaaccgtatgttccaggccatccttccgctacgcggtaagattctgaacgtcgaaaaagcgatgtatcacaaagcactggaaagcgatgaaatccgcaatatatatacggcactgggtgtcactatcggaacagaagacgacagcaaagaggctaacatcgaaaagctgcgctatcacaagattatcatcatgaccgatgccgacgtcgatggttctcacatcgacacactgatcatgacattcttcttccgttatatgccgcagattattcagaacggttatctatacatcgctactcccccgctctacctctgcaaaaagggtaaagtagaagagtattgctggacagacgcgcaacgccagaagtttatcgatacctatggcggcggtctggaaaatgcggttcatacacagcgctacaaaggtttgggtgaaatgaacgcccagcagttgtgggaaacaacaatggaccccgacaaccgtatgctgaagcaagtaaacatcgataatgccgccgaagccgattacatcttctccatgctaatgggtgaagacgtaggtccgcgccgcgagtttatcgaagagaatgcaacatatgcgaatatcgatacataattttaatattacgtttttataaaccaacctcacatcttacaacgaagaagcgtcggcaagcgaaggaaaatcctccgtgtcggcgcttttctatgtcttaataaaacctaacagttaaatctttttccggtcaaaatcactatcttgccgaaaatgaaggaggacacttatgaaaacgactaccccaaatcctgtatttgccaagatcaggctctatctcagaattctggcatcctgtgtgattgtcacttgcctgttcctgattattatccatccggaggcatggattactccggcttgcattatcgtagctatgatctgcctattatttcttctgatacgatccaaacacaaagagtcgaggaaatgaaagaaatatcagatcatatcatgcgcctttaattccttcactgcgacttccagttcctggtaccacttctcgccgaatttacggatcagaggttctttcaagaattggtagacagccacattttcttttttccccagcaacacagccgccttacacacatcccaacgatgatagttcaccgccttataaggtccgtaatctccaatccggatgggatagagatggcatgataccggtttgtaaaagtccgtcttgccatcccgataagccttttcgatggcacagtaacaacatcctttctcgtcatagcaagtaaagacgcaatccttattattaacaatagaagtcaccagatcaccttcctgatccgtgtataccactccttgcttctcaatgacagcacgtgcttccggcgacagctcttcccatattatcggcagaacctcttccagcttttccacttcatccaactctacaggcgcccctgcatccccttcaatgcaacattcgcccttacaggcgtccaaattacaaaggaacttttcccgaaggacatcgaagctcactactacatcttctatctgaatcataatttcattcttatgttaagcccacaaaagtacgaaaaagtagtaaaagagattttaaattactgcatttgtatgtagtaaacactaaaaaatcatctatgagagcactattctggatattattaattgtctcttcgaactgctgggagcaaacttggaaagaatttaaccctacattgggtaaaacaatcgacctaagtagagaaggagaaaaagcattcatcaaaggacttgaaaatgatgaactcattgatggaaaagacaattactaaaaaaactagagacattatgaatgttagtcaaactaatggatgacggactttacagagttttttgctttctcttttatccattctactttagaagatggtactttcacctttttcttcaaaataatttctgcaatttgaattgttttcttttcttcccccttcaactgatacaacttcattaattcatacaatgggacaaatcgagccgggcacatcaaagaagctaacttcaaatgcttttcagcgttatcatattgagtcgtatttatacaattatcagccatcagcaattgtaaattataatcagcccaaagttcactacattgctctgccatctcttgactttgattgtaatattttccataattaagttcagcagcataattatagagaaacaaataattgtctcctaatttaggcaacaactcattataacgagcaaaagtcatatctgtttgctttattaatgaaaatttagccgtgcggttccatgctgtggtatagagtatatgtcgggttatataaatgaaagccgccaatgacaaaccgattatcaacagacacatacttctccgaagccattgaggatatttagctatatatccggcgtgaaaaataataacatatatactgtatatcatcatcacccatacaaaaggataagatagcggataagaaaagcaagcaaaaacagcaatgcctatcaagcaaacggttgcaatattagtttcgagacaagaattacgtcgataacatttccacaaaaaataaacaaaagtaagaaaaagaagaaaacctattagaccataatttacaaccaacaatatatattcattaaatggatgtttaacatcacctgctaacatcgcatatttattatcagtatctcgcgcaaaatattcagcctgataattcatataattagccaaaaagcctccacttccatatcctgtaaccgggttgtcttttatcattagcgcggaacatttccaaatgagcagacgaccgtctgccgagtcttttttaaagaaatacagcaaagttacaaataccggaaatagtaataaaagtaacaacaaatatttctttcgagaacctatttctgttttctgtaaaaaacaaacaatacacattaccgcaatacttaatatccctgttcgtgaaccggacaatacaacaactattataacacatagcccggcaagaataacactcccccttattagttttgaacaataatgcatataaatataaaacactgcaggaaatccagcacaaagggaagcggcatatccggcaggattatcgaaactgccactaagacctaaataagaatgaaatggaataatatgagtatattgcaatatcccatgcatcgctaaaacaacatcagatagaagaacaatgatatagaaagatggcagtaacttattcagactccatgaaaaagaggacatactaaaagtactgtttgctattagaaatagtaataaaaggataatggaagcataccatttatcccctatagtaataatcggactctctatctgcaagaatagagaattggcacataaaagaaatgccagtatatagagaaccttatatctcataccaatcttaggcagcagtctccttccagtcattttgttaaagtattatcatcacattttattttcaactttaaatttattatttcattttatctcaaattctcttgtttcgtacaccatttctccttcctctgtcaagccctcaattaccactttatatgtggtagccttatctgctgaataaaataaaaaatcacattctcctgatgaatctgtttgtaagctaggattccaataaagtgtagaacgaaaatccggtatcaacgcattatccttattgcctttatcatatttgggagaatagaaagctactggttcttggtatcctccagagggataaacatccgtttgaatatcatcaagcttgccatagcccttaaatcgttgttcaatagaacataaatgtaataaaggatccaatattacgcctggataaagtactaattcaagaatggcaacagaagtatgctgctcatattcccataaatacaaataaggctttaggattttttttctatcaatactatttaaagaaataacttgaatatcactcaatgacaaataattaagaattccagcattggaatgcatgttaccatttatcattaacacaagaggcatatctttataaaaacatgcccaagcattcattatcttcacagaagctttacaagatcctttcattgttgaggtataatatggatatttgaatttaactcccatatagtcaaccaattcccacatattcttaaatttaaactttgctatctcccttaaggtcaatctcttattcagtaatttggatttaaccgtcacctgatttaataaataatcactcataccaaccggatacaccatatcccgctgaattccaccggatatttctgacagaaacggctgtggcactgttttgtctgacagaatatacagttggtccttatcgagaattatttctgccttattacgcccataattttcacctttccgtatgaaccgcttgcctatcatcccaataggaacgccttccgcaaactcaacactatccactcgaaacgctccatcttgaccaagttttattaccctattaagaccgaactccaaattcctcacgtacacatcataacggcttttaccttctcctttctcatttttcagccttcctgataaggaggtaaacttctccggctccattacaggtctttcaaagtttccttttataatctccggcaatcggtatctcttccatccgtgtatcataagaagcaagtccagtgccttttcagcctcgggattatccgtttgcaaataaaaagacggagtttcaattctccccttcaattcggatgaaagcagcaaagtagacaaaatagaatgtgtggtatccgcaactgccatggacttgtctgtgattgcaacagaaaggttaccctttacaggattgccattcatatccgtaagcaacaggctcgtgcgaaccggtgttctttttccataactgtttttatcattctccattttacacacaatggtcttccggtaaggaataaaacccagcctttcacttaatacattataattcttatccaacaacagacattgaacgattccggacggatactaatcttttgcaatagtgattatgtcgcctttatcggacagtaaccatcgcgcacaaatcatttttccacgtacatgcgccagcaatagaagtttctcgtgaggtgaatgtaaagcggaatttatggatatctgtatatctttttttcgactctgcacaacgattccgtatgctgattcctgcacttgtggcagttcaaagatttttcttataccctgtttattaagcacttgcacgctatacttttttccacttttgggagtaaaggtaaatgcacccattccggcatacagagttttactctctgccatcacattcccctgttcatctatcaattgtaaggtggcatctatgctattgccactaacatccagcactttataagcagtccgacaaggcgtatctgccaacaagtgtcccccctccgggtaaaaagtgacatcataatcctccatccccgtactgatagcggcatattgtcgaaaagtattgtttcggacatcggtcatatccagccgcacacatgcgtcgggagttacttttttattgcgaatgctcagctctatttttttttctttatccagtttgacagagactgcttttcccttatcgcaaacagctttcacttttttcaacgggatttgctcctgcctgttattccaaagttgaagttgcaattctgtattttcttcatgtgatgatgttttgctgcaagctttcaagtgcgtagtctcccaattacttgccatcgcgatgcagacttcccttttaaataccagctgattcttttccgaaagcatatagcgggtataagcaagaagagcatactttccacctggcagaccttcggggagggagatatatccatgaaattgattcatatcatccggtctaacttttgccctacccactgtttcattctccggattgaccagttcgacatatacatatcggcttagccgaataggaatatgagaagacgcattgaccatgtaggctttgaaccacaaagtgtctccgggaaggtagcacgaacggtcgatgtgaatatgcaatttttccttgggatagatacgaaactgttctgtcatacaatgggcaatagtatcgaatgatactattgtctgtgcagacagggagtggacggtcaatgaaatcagggcaaagcagcagattttcttatatttatttattaaatccttcataataatcagtttaaccaacgaccaaaacaatcattccattaaatataccaaacaatgaataggatacttgaaattaaacctcctaattctttattcgatacaatgtaaataaagagaattttaaaacttcaaattgaatataatctcttaagttccttcattaaagaagttataatacaagtcatattaccaaaaagtctcatgccaactaagactagcattccactcttgtgctacaggtagccatgtaagcattagcgtataatcataattttcatcaaccgaataaatctgccagcccgaatatctagaaacagttatatttatactaaaataaagactacctttactatagcctgtattaggattgatatctggaaaaccacatatatactcagggtctctagtagtaaaagtgcaattcacattatcggatttccaatatcctgcaatatcttgccagcattcaatctcaatgtctcgaactgtataagttgcccaatgtgtaaaatcgaactcttccttgtaaacagttcttgttcttgaaaaattctttttttcagaattacatttaactttcactaccaaatgaccatctggcttcagctctatattttctgaaggtatttgaatcgaaccggagcgttccctatttttatacgctgctaaaaaaagagatgcctccttttcagtcattggaggattaactggtttactactaagtttttccactttaaaccccgcttctctaaacatttctgctactctatcttcttcacttaattccgtattatcttcttcgaaattagaaatacaaccctgcataaaaaggcagggtatcaaagcagttaagagtactaataacaatttatgtttcatctttatgatttttagaataagttatgagctaatttaattttacataccgaatcaagtatctgcatctcatacaaatcttagacagtagcccaccgtctatcttgcaaaagcataatctttacatttaaatttattgtttcattttattaccaactctcttatttcgtacactatttctccttcctctgtcataccttcaatcaacactttatatgtggtaatcctgtctgcggaatagaaagaaaaattacatttccctgataaatctgtttgtaagttaggattccaatagagtgtagagcgaaaatccggtatcaacacatcattattattacctttttcatatttaggagaataaaatgctatcggttcttgatatcctccaaagggataaacatccgtttgaatatcaagtttgccataaccctttatacgtttatcaatgccattaacatattctaaagattcaacatcaacatcagaatgaagttttaattcaagaatggccactgaggtatggtgttcatagctctgtgcatagctgtataatcccaaaaacttttctctaccaatactatataaatgaatcgcgcaaagatcactcaaagataaatagttaaaaatcccaggatccagaagtgggatatagccgtttacaattaatgcaagtggcatatctttataaagacacttccaactaccccacaatgtgacaccaatatgacaacgtccttgcattaatgaatcaatgaatggataactaaatttaatacctaaatattcagccaattcccacacattctttaatttaagttttgcaatctcccttgaatttaaactcttatttagtgcatccgacttaactgtcacctgttttaagaaataattactcataccagccggatatattatatcccgccggataccactggacatttccgaaagaacaggttgtggaactgttctgtcggaaatattatatgtctgttccttatccagaattatttctgttttactacgcccgtaagtttctcctttccgtataaatcgctggccgatcattccgatgggagtaccttccgcaaattcaagactatcgagccggaatgcaccatccggaccgggggttatcgtcttattcagtccgaattccagatttctcacgtaaacttcataacggcttttaccatcacctatcttatcttttagccttccggataaggaagtaaatcgctccggctccattgctggtttctcaaagttaccttttatgatctccggcagtcggtatcttttccatccgtgtatcataagaagcaagtccaatgccttttcagcctcaggattatccgtttgcagataaaaagacggagtttcaattctccccttcagttcggatgaaagcagcaaagtagacaaaatagaatgtgtggtatccgcaacagacatggactcgtctgtgattgagacagaaaggttaccctttacaggattgccgtttacatcaacaagcgacagattcgtgtgaatcagttcccttttcccatagctatccttgtcatttctcactttacacattatagcctttcgataaggaataaaacccagcctttcgcttagcacattataattcttatccaacagcagacattgaacgattccggacggatattgatcttttgcaatagtgattatgtcgcctttatcagacagtaaccattgcgcacaaatcatttttccacgtacatgcgccagcaatagaagttcctcgtgaggcgagtgtaaagcggaatttatggatatctgcatatcttcttgatggtcttttatgacaattccataagcagatgattgcaccggaggaagttcaaagactttctttaccccttgtttgttggatgtttgtacgatatacctttttccactttccggagtaaaggtaaatactcccattccggagtgcagcgtttcacttgttgccattacatttccctgttcatccattaattgcaaggtagctgctatactattaccactaacatcaagcactttataagctgttctacaaggggtaccctccaacaagtagcctccctcaggatagaacgtgacatcataatcttctgttcctgtacttatcgcagcatactgtctgaaaacgttgttccggatatccgtcatatcgattcgcatacaagcctcggacgtcactttttcattttgaatacgcaactctatctttccttcgtcatacagttttgcagaaaccggcttccccttgttacaaacggctttcactcttttcaagggtatctgtttctggctattgtcccaaagctggagttgcgcacccgtgatttcaccatgaggtgacaagatattcgctttcaagtgtgcagtctcccaattgcttgccagggcgatgcagacgtcccttttaaagacaggctgattctcttcaaaaagcatatagcaggtataagctagcagggaatagtttccaccgggcagatcctcggggatagagatgtatccatgaaactgattcatttcatccggtctgatttttaccctgtctattgtttcattctccggattgaccaattctacatatacatatcggctcaaccggatgggaatatgagaagacgcattgaccatgtaggctttgaaccacaaagtgtctccgggaaggtagcacgaacgatcgatatgaacgtgcaatttttccttgggatacatattaagctgctcggccatacggctggttatagtatcaaatgatactttttcctgtgccggaagtgaggggacaactaataaaattaaaatgaggctacaaattatcttatacatattctttatatcttaaaatcttaccattttacgttctttttcctttttgtcccattcttcctttttcttcagtatttccggtttcccattcacaacatcctctctggcaaatagatgcttgcgggaattatccaatgaaatccactgctcagccacagccaaacgcaattcataatctgccaactcacttactacttgtacactatccttcttccttataaaatcatagttctttaattcatcccaatatctttgagcctgttcatctgctcttttttgagaaacaaacttaaaataatcttccaattgctgatgagtaacaacatttatcaaacattttccttccaatttactccgttcaaatttagtttctccgtttttggatgcgtcttcatacatagctttgtactctgcctgcttaattcgataatattcagccagtaactgttcaatttgctgttctgataacttcgtcacttcccgtttacaaataatatccaacagtttattatgagaaaacgattcaatagtttccaacttaagtagtagtaatggcttatgtgcattgagtcgataacgctctttatcgtatcctttattatctcccctactgctcatatattctaatatcccgcttttttctctttcaaactcatacaattgttttataatagctaaactatcgcaagtcgtagaacataattggtgcacctgtatctgcttccattgctgtgcagctattttctcagcctgtcgcgtttttctaattataaaaaaagccttatattgcgtttctgaaagaatctcagccaaatattgtttttccatactatcatgtttgtaatcttgaactccgaatcgtttctctatttcttcactatgatgtaaaagttgctcaatttgaacatgagacaagttcaattcctgtctatatttaaccaccgtacgcagatctgaaatatatggcagttggggaccgttattcttttgatagaacatataatcattcccttctaacggggtcaataaactcgctattgtatttattgacggacaataccatcgggcaatctcatctaatgattttccttttttcaattccatttccgccaaactatcgttttcttggaagaaggtccttaaattcatgatactttcatcagaaagtgatattttactgctgatagcataaatttgcatagcaatacttatagaattctgagatatgacaacagactgctctttgctttgacaaccagataacaacactattacaataaatgtgcttattaatttcatttttcttcttgattatattacaaattaccaccaatatcgtgtcccatccggcataataatgaaaggacgctcttttcgttcggaatactccggcacaagaagcattagtacattttgcggtacctgattgaattgcagacaatcggcatccattgttgcaacttgtgttcccaatgaaatccatgcattatcccaataaaaaagttcatatttcttatccgggcgaaaacgcagatagcggtcctgttcttcaatttcaacagtcatagtatgcaataaatccggaactaaatacaattgatggttataaccatttactataggataacctatcggtataagttgatgctccttatatatcataggaagaataaccacgccacgaggcatattatgaaatgtaactgaattttccattcgttcaccccaccactcagcattccatctacccatactaaacatgcaggcatatataatgtgagtagtatcattaaacaaaggaatggtcacatcagatgtttcccaatattcatgggttacatcaatatagtttgttttttgtaaaaatccagtaggaatacattcttccttttctttagatgctaaggtgccaggttggctggaataagtataacgaattactttagacggttcccgatcaagtggatgatctacaacagcgtgtgtggtaacatccaacttcaccggtttcatcttcgtatcaaaaacggtgttcgagaaatgtgctccggcagaggttgcccataatggcacagatatgtaagcagccggaataccttgcgaacgaaaaataaatgtttccaaagctgctatatcctcacaagctcctttcttacgaaacaacaattgctgcgcacttagacgggagagaggctcatttctcgtttcacttccataagtgaatgtaaaccaatctttgtaatcgatagcagcataatcaagtacattctctaatggcttattctgaaggctgtctgtcaaccagtgatatctcttacaatattcttttcgccattccgttacaggctctactgtaacccggtaaggtaatatatattcgcagaaatcgttaaaaggtatgtctttatattcagatagccgccaagtatcaaccgcatgatttacattattaataagatatttaccagttaaactatttacatcgtaaatgatagtatcttgaaaatccaaggaaccatattttttcctcattgaatcgattgcctttacggctgtttccaaattagcataatcgaactccgaaaaatccactcttttcccttcgcgcgttttccaatagtaagtttcactgtaatggatatccatatgcgccaccaaaaactctatggcttttatctttatactgtctccctgtttataaaaataatccagtgccttttcaagttccttacggttattcccagctttcgctaatacagtttctacactaaatggatattttgtttgttgtgtgtcacatccggtatagaaaaaaaacagacttactataaataggtagatgtttttcatcgtaaaaaaatatatttgcacaaaggaagctgtttttaccttcagaagagtactagaatcaaccaaaagagttcgaatttcattcaatcacatttttcatgaaagagaaaggaaaaataggataatataaatcagataaactacaaatttcactgcacaatgactgcagttataactttcttacgaaatcaagctgtttgtgaaattaaagaaacaaaataagggggcactttgcgaagtgccccctttcattattacagtatcaagtaaattacttaatcaaaatctgaccgttcatatcagccggagcttccagacccatgattttcaggatagtcggagccacatcagccaggcgaccgtcttctactttcgcagctttgtttccggttacgtacacacaaggaaccggattcagagagtgagccgtattcggagtgccgtcttcattcaaggcatgatcagcgttaccgtggtcggcgatgatgatagcttcgtaaccttgtgctttagcagcttcgattacatctttcacgcaagcgtctacagccacaacagccttctcgattgcttcgtagataccggtatgaccaaccatgtcaccgttagcgaagttcaccacgatgaaatcatatttgttttcgttgatggcatctaccagcttatccttcacttcgtaagcgctcatttccggtttcaggtcgtaagtggctactttcggagatggaacaaggatacggtcttcgttgtcgaacggagtttcacgaccgccgttgaagaagaaagtaacgtgagcatatttctctgtttcagcgatatggagctggctcagtcctttggaagcgatgtattcgcccagtgtgttggcaacgttttccttgtcgaacaggatgtgaacacctttgaaggatgcatcatacggagtcatgcagtaatattgcagtcccgggatcgtatgcattcccgcttccggcatatcttgctgagtcagtacgacagtcagttctttggcacggtcgttacggtagttgaagaagataacgacatcaccttctttgatggttccgtcgcagttggcgtttacaatcggcttgatgaattcgtccgttacaccttcatcgtaagattcctgcatagcctgaaccatatcggtagctttcttaccctggccgtttaccagcaggtcataggcttcctttacacgttcccaacgtttgtcacggtccatagcataataacgaccaatgatagaagcgatcttgcctgccgatttctcgcagtgtgcagaaagttcttcgataaatcccttgccgctcttcgggtcagtgtcacgaccgtccatgaagcagtggatgaatgtattgtcgatgccgtattctttggagatgtcgcaaagtttgaaaagatgaaccattgagctgtgtacgccaccgttggaagtcagtcccatgaaatgaacgctctttccgttttctttcgcgtaagagaaagcagaaacgatttcggggttctgcaggatgctgttgtcagcacatgcgcggttgattttcaccaaatcctgataaaccacacgtccggcaccaatgttgaggtgacccacttccgagttacccatctgtccgtcgggcaaacctacgttctcaccacttgcctgaagttgggaatgaggataattgttcatcagataatcccagtaaggagtgggagtgttgaagattacgtcgtctttcttttggtcgcctagtccccaaccatcgaggatcattaaaagggctttcttactcataatatttcaatatttaaattatcactctgattttcgggtgcaaaggtacaaaaaagatgattacgtaaacgtttaatctatgttaagttaaaggggaaaaagagagggagcgatggatatttttctttctttgtatagggaactactaaatgcatttattcaaaatttaatattatgaaaacgattctactctgcatgatgctcatgctgtcgggtatgctcacagcacaaaccgtcgacaatccgccattcaaagcccgttcgggaagtattggcaatatcacccgtatagaacgcacgcccgatggcacgcgtgtttatattcacgccatcttccgtccgcactggtggataaaggaagaaggagacagttatctggaagatgcagccaccggcaagaaataccagttcaagagtgcggaaggcattgagctcaataaggaagtgtatatgcccgattcgggcgagatggactatgtgctcgttttcgaagctctgccggaagagacgcaggtcatccatctcctcagtcccagcgatacggaaggaaatacgtatgacatatccttagtaccgtcctccggcaaaaacgtttcgccgttgacggcaatcaagggaaactggttcaaggcagatgatttaaacacctgggaatacggcatctacgattctgttacgattatggacaaccggatatttaccaacgaaaacatccgtaagaaagggaagcgggtggaaatcaccgtcaaggacaagcagaatggagacatacgcaccctgctggtcactccgcagaaagacggaagctgccagatacaagtgaacggagaaaagaatcagttgtatacccggcaaaggggagctacaaagacaatcgctgccgacacaggtttccagcagttcttccacacagacaccacctgtctgcaagggtacatcgacggctatgaccgccggctgggatttgacaccggtctcatctatctatccaaccatatcacccgccaggactacccgactgtgattcagatagacgaagacggcagcttcctgtgcaagtttgtcatcaagcatcctgtagaacagtcggtcacgcttgacaacaactggattccattctatatcgagcccggacagacgcttaccatgtatatcgactgggaagcattgctggcacgcagccgtgcacgcgactattatttcccgatcaagaacacagcctacatgggcccgtcggcttccctctcctatctgctgaaggaattcaagtcgctgatcccctaccgttacgatgatttatccaacgcgcgcaacaaactgacgcccagccaatatcaggagcacatgaagccgattgtcgcccgatgggagcatacagccgattcacttattcagatttgccgcccatcggcaaaggctgcccgtctgatcaagaataaggcagacctgcaggcaggaggcttgttcttcgactttctgatgagcagagattattatgcgaagcaggatacagccaaccaagccttgaaagtgaaagaagaagattcttattacgacttcttgaaaaagatgccactgaatgatgaaacagtgcttgccgatgccaatgcaagctcttttatcaaccggtttgaatatatggacgccttcagaacagcctataattatcatgcaccgaaagcaaaggataccatctcttacacgtatccggaagaatcgcttctcgcttttcttaaagagagaggagtaaaactgaatgcagaacaggaggcaatcagactgaaacaggagaaactggcaggaacaaccgtcagaatccccttaaaagaacttcaagaagagaatgacaaggtgacaggcttatacgaaaaagaagaaaaactagtcctggagtacatcgacaagcagtataaaaacaagcagtcagagcaagacatggacagaaactttatctcgatggaacaaaaaaacggtcataagaaagacagcattcttgcccggctatatgatgtgcccgatcctttgctttggcaaatagccaaagtccgcaacctgggtttcagcctgcagaatatcaagacacgttccattgcccgtgagtatgtggacagcatcaagcaaaagctcactcacccacaattggcagaagagaccgaatatctgttcgccaaaacgcatccgaaggaaaaagtcaattcctatcaacttccggaaggcaaagccaccgacgttttccgcaacattattaagaatcatccgggcaaagtcttgttcgttgacttctgggcaacgacctgcggaccttgtcgcgcaggaatagaagcgacggcagacctgcgcaaaaaatacaaagatcatccggagttcgagttcatctatatcaccggacagaaagactcaccagccggtgcatataaccaatacgtggaaaagaatctgaaaggagaagccagctattatgtcaccgactcagagttcaattatctgcgccaactcttccgcttcaacggcattccgcactatgaacttgtgctaaaagatggcagtatctccaaggaaaaactggggacgcatagaatcagaaagtatttggaggagcacttccccgtttccgagtctgccggacagggagagaatgatcagtaatcccgactgagtctggttgtgacactttgacaagaatgcacattaaggataagatcaaaggtcagtagccactttcccaattgaaaaccggagtggtaggcatactttataattgaataacaataatttatgtatttacctaccacctccccctacgggtactcctccttcccgaaggaggagatttaagatactattgactttttagtcagcccaatttcagttactattgacttttgccttcctcttcgacaaattcagcatgacagatactctctagaaataaaatgcttttctattgtcacttatcaccttttggagataacaagctgataatgaatacacttctgatgataatagctggtgacaatagggtgataataaggtgataatagccgtaaatcatgctttttattgtcacttcacccctatttcatgacttattacctgtcatttcctccccatcttattacctattacctgttacttatcacctgttacctattacctgttacttattacctattacttattacttattacttattacacctatcacgcctcatccgagtcttgaccttataccacaaatacgataagctaccaatgcttttagctcatcatgcctttatacttccattaagctaccggcatctttacctgttcacggccgtgacaagacttgatcacatccgtgagcagcatttgccacgaccgtgagcaactcttaccacggccgtgaacaactaatgatatcggtagcttatcccaactttccttataaggaaagtctactatataaggagctaacgggaacttcagcactatcttacaagtgattttaccatagtcaaccaatgaactccccgcacactgaaagaccataaacaacaagaaaatctaaaaaaagcgatgcaaaagacggaacctcggttaattttccgtacttttgtatcgcttttaaattaaatcatagaaaaatggacgattcaaacccgcgaacgtgcacttatagtattaattaaagcgatcagagtcattgaaaactgatgcctctgctcgtgtaaacaaacgaaaggaggcaataagatgagaacatatctttattgtgaagctggctttgtggaaaaaccgcaatggcttcctaactgctgggtaaacgtagtatgcccggacaacgatgactttgagtttctgactaaaaccctgaacgtacccgaatcatttctgaacgatatagccgatacagacgaacgtccgcgaaccgacacggaaggcaactggctattgacgattctgcgcatcccgatgcaaaacggtcagaacgaaagtcttcccttcggcaccgtacccatcggcatcatcaccaacaatgaaatcattgtatcagtctgctaccacaacacagacctgctgccggacttcatcgaacacacccgccgaaagggaatcgaagtccgcaacaaactcgatctgattctccggctgatttattcgtctgccgtatggtttctgaaatatctgaaacagataaatctggatatcagcgccgccgaaaaagaactggaacgcagtatccgcaacgaagacctgctccgtctgatgagactgcagaaaacactcgtttacttcaacacctccatccgaggaaatgaagtaatgatcggaaagctgcaaagtatctttcaggacactgactttctggacaaggaactggtagaagacgtgattatcgagttgaaacaggcatttaataccgtgaatatctacagcgatatcctcaccggaacgatggacgcctttgcctctatcatctccaacaacgtgaatgccatcatgaaacgcatgaccagcctttccattacactgatgatcccgacattgatagccagtttctacggaatgaatgtggatatccatctggaagagatgccgtatgcctttgcactgattatcctgtgctctgtcgtgctgtcgacattagcgtttatcgtattccggaaaatcaagtggttctaattcaagcgactgccattcaagcagttctaaatctccctttacgtcagagacataaaaaagcagcctgtcattcttaagacctgaattcaaggtcggcgatgacaggctgcacacaatacgttttttgttcgatagagaatattaaaaagagaatgtttaagagagagaaattattttatccttctttactggatttctttccgcccaatggcacagaaataccaacaaatccatttactgtctttgtactttttccaaagaacatatagtccgtaccgataaacaaaggcccaagtttcacagccaaaccaaatgatttaccagcactctgaatcatagaataactgattgccgcattcaaccaacttttcggacgaatattagccgaaagtgtaatttcagtctgagttttcggcttagtgaagcgggtagtggaaagagcaccaatcgccaaccatttatccaacagttcatactcagcaccaattactactgtagaatgaagagaagtggtacgagactcaacaacatcttctttttgcagttggagcatttcgtaattcaaaacatccccaccttccacacgattcataaaatcttgggcatcccgctggaaatcctctaacccttccggagtaagtgcatagtctttgccatcataatccatacttcctttagctgttgcaacacttgtactcccctttgaccacttgataaaacccaaatccaacacagaagcagacactgtcaaattatcaagaatcttataagatgcccctaaatcgatggcaccaccataacctgcaatgccaaatccgttaaaatcaaaatcatcaatatagtgtttccgaggatcaggatcactcgtattttccaccaaatccattcctttgaaagagctctcaagacgcgcatttactttcattttagcatgataatcacgaatctgattgacatcagtaatatcgttaatgtttagtggcaaattcgcatctacattcattccgtctaccttcaaattcaagttacccataccaagtaataccttaaatttaccacctactgacaagcgatcattaatagcgcgggcataaccaataccaacttcagtataagcatttatattcaattcttcctttccaatatcaaattttgaattattccaactgaaaccatcttgatcaatatcgtgcaagaagctaaacatggacttaggtatctgagcacctaaatctacacgggcacctacattaaccgaccaaaagttctttcctttataccatccgaaagagagaatatccgtattgacattgacattcaaccggttatcattagacaaacgattcatgaatttctgattattatagaaaccatcactattatcaataatatctataatatcttgtgtacccaaagaatttgaacttgccgatacattcaacgaaccaattgccggaatattaaaatatccgctagtcggtgccaaagccggattcaactgcatacgataatgagtaccttccataaaatatgaagtacgtaaaaactgcgcattggcaggtaaaacaaaacccatcataagaagtaaagcccccatgaacttcttagatgcataaagtctgcttgttgtcatgattttatctttttttaattcttgttatcgaatgcaaatatatagcatttaagtaacaaataaaagcacaagtcaacacttttttagcataaaccgaacattttcatggctatttggagaaaattcgtgcttattctgcaaaaatatgtagaaagtgaaacaaaaggaaatatcagaaattcaggttcaactgcccgtcaccaagcagattgaaggtcattcggtggtaaggggtcgttccatgttcggcgatggcggcacgatgttttttagtcgggtatcctttattcttattccagtcataaaacggatattcttcgtgaagacgattcatataatcatctctgtaggttttagccagtatagaagcggcggctatcgagaggtattttccgtctccttttatcacggtagtatgaggaatgtcaggatatttattgaaacggtttccgtcgatcagcaaatgctgaggacggacagagagctgatcgacagcccggtgcatcgccagaaaggaggcgcggagaatgtttatctcgtctatctcttcgggcgacaccactcctaccgcccatgccagcgcttctttctctatcacttcacgaagtgcgtagcgttgcttctcggtcagttgcttcgaatcattcagcagctcattcttgaaatctttaggaagaatgacggcagcggcatacactgatcctgccaggcaaccgcggccggcctcatcgcagccggcttctatcaggtctttatttaaataaggtagtagcatacttattctttttttcttatttgccacaaagataaaggaaataaaaaaggagacctcattcaaagtcccctttttccgtcattcattcacacaaacaagcaattgttccccaaatatattctaccggttcacagccttgacgaccggaaccatcaccctaccattcgttttacagattttgttcgttgataacatcagcctttccccttagccattatgatagatttcttccatttcccctttataacttataatatatcgtcttgcaaaagtatctaaataataagagacgagaaaatggctttgagcgagtatttgcatgaaatgccccgaaacaggatcatctgccggaaaaaagtgattaagtgcgcaaaaaaggtgtttacccggttctatataatcagaaagcgataaccggacttatctccggctatcgccctcttcaataaacaaaccttcttttagttaaaacaaactccaggcgacggtaagccctgccatcacaatggctaccatgctcataagcttgattaaaatattcagactcgggccggaagtatccttaaacgggtcgcccacagtatcgcctactacggttgccttatgcacttcaccgcctttgcctccaaagttcccctcttctacatatttcttcgcattatcccacgcaccgcctgcattggccataaagatagccagcacaaaacctgtgctcaaaccgccgatcagcagtcccagtactccggtcactccgaagattaatccggtagcgataggcgcaaggatagcaatcagcgacggaatcaccatttcgcgctgcgcacccttggttgagatagccacacaacgttcataatccggctcggcttctcctgtcagaatgcctttgatctcacggaactgacgacgcacctcatctaccatgtgtccggctgcgcggccgaccgcattcatcgtcaatccacagaacaagaacgccatcatcgaaccgaggaacataccggaaagaactttcggattcatcagcgtcacgtcgtaatagttcatgaaatcgacaaaggtagcattggcggttgagacaacatcgccgttcggcatactcaggtctactgtccccaaacgggtcagaccgatacggatttcttcgatataggatgccagcaaagccagtccggtcaatgcagcggaaccgatagcaaaaccttttccggttgccgcggttgtatttcccaaagagtcgagcgcatcggtacgcttgcggacttcggcacccagaccggccatttcggcattaccgcctgcattatcagcaatcgggccgtaagcgtccgtagccagtgtgattcctaatgtggacagcataccgacagcggcaataccgataccgtagagtcccatacccacgttggaaaaatcgaaaccggaagcaagcaggaaggaggcaatgatacccaccactaccgcaatcacgggaatagccgtagaaagcatacccagaccgataccggagataatgacggtggcaggtccagtctttccgctttcactcagtttctgagtagggcgatacgactgggaagtataatattcggtagaacgtccgatcacaatgccgaccaacaggccgactacgacagcgcatgaaatccaaatccagttgtccaactgtaagagccacaggattaagaaggtagcagccacaatcagcacggaactcaggtttgttccgaatgccagcgagccgagcaaatctttcaccgtcgcattttctttggtgcgcacggagaagatgccgataatggaaagcagaatacctaccgcagcaatcagcatcggggcaataactgctttgaactgcatgaccgtatctgccgaatgtataaaggcggcagcacccaatgcggcagtcgccaggatagaaccgcaataagattcgtacaagtcggctcccatacctgccacgtcgcctacgttatcgcctacattatcggcaatggtggcagggtttcgcggatcgtcttcgggaattccggcttctaccttacccacaaggtcggcgcctacgtcggcagcttttgtatatataccgccacctacacgggcaaagagcgcctgtgtggaagctcccataccgaacgtcagcatcgtggtagtgattacgcaaagtttatgagtcggtgtcagtgcgtcggcgggaatcaccgcgttcagcaacagataccagaaagatatatcgagcaaccccagtccgactacaacgagtcccattaccgcaccactgcggaaagcgattctcagtccggagttcaatgaattgcgtgccgcattcgccgtacgtgccgaagcataggttgccgtcttcatacccaggaaaccggaaagaccggagaagaaaccacccgtcaggaaagctatgggaacccacacattctgaacatgaaagccataagccataattgaaaacaaaataaccagcccaaggaaaacacaacctacaatcttgtactgttgtttcagataagacatagctcccttgcgtaccgcagcggctatttttatcatttggggagtaccttcactctctttcatcatctgcttatggaagtaataagcaaaacagagggctaacactgaagcgaccggaaccagccagaaaagaatgctatccatagaattaattattaaagggttttatggaggctaaaagtatggaaatcaaacgaaaaaagcaagcaaaagagaaaaaaaatccaacttgccgattgatgcgataactctcaatgaaacgaaggtaaaacaagtaaaaaagtcttttgagaatcctgcaaaagagcatcaggccaatagctcgttagttaatttttagtcttattacgttaatcgttaacaaacccgttatttctattaaaccatgttataaagcgcctcactttgccccgaaaatttggagatagccgaaaagtccctatctttgtagtgtgtttttcatagtattagatttaaggttaacaaaagattggctgtctgggatagatagcctttttttatgcccgcaaactaactattgcctgttaaactacagggattggatgccaagaaaatgtataaggtaaaagaaatcaatctgatgccgaatagtaaatccagcctggctgccaacgaaaagacttattccagtgattatctgatgaaagtgggcatagatgctttcaccactaatcaagcctttagccgcgtgattgagcttacggcagataacttcctactgccttactcatgccaagcctttggcacgcttgtgccaagggcttggcatagcagtgccaacgcagtggcacaactgtgccaaaggcatggcacaaacattaagaacaaaaggggaaacaccgttcgtggtgaatcccctttctcatacaataaaacaatcaactaatcttcaatcgttacagcagttccgttggcagttaccatcagcatactaccgctgcctcctactgtttcataatccagatcgacaccgatcactgcattggctcctaactttgctgcctgtgcctgcatctcctgcaaagctgtatcttttgccatacgtagtacttcttcatatgcaccggaacgacctcctacaatatcccgaatacttgcaaacaagtcacggaatacattggcaccaatgattgtctctccggaaacaattccgtagtactttactattcgttttccctcaatgatgggagttgtagtcactaacatgatctttttcttcttttttagttgtttactatcctattagacgcaggatacccccaaaaggttgcaatgtcaccctaaaaaaattgcggctataccgcaagaatatgcgatatagccgccaattagagttaaagagagagagaatttatagaaagcgcggtctcacgaccaacttaatatacctaaaatgatttttattctttcttattagacgcaggaaacttcaaatcactgcacttcaaagagatttttttagttaaagaataaaaaaaatcgctattcttgcaggaatagcgattaatatctttagaacatctggctgacgcgttcgatcccagccactaatgcgtccacttccgatcgtgtattgtacatggcaaatgatgcacgtaccgtaccttcgattccgagccgctgcatcaacggttgcgcacaatggtgccccgtgcggacagcgatacctaaacggtctaacaatgttcccaaatcgaaatggtgaatatctcccaccagaaatgaaatcaccgctccccgatctgccgcctcaccgaaaatacgcatattgggtatttccttcaatcgcttcagcgcatacgtcgtcagctcgtgttcatgagcggcgattggatcgagtccgataccattaacatagtcaagggcttttgccagtccggtagtaccgatgtagtccggcgtaccggcttcaaacttgaaaggcagttcgttgaaggtagtcttttcaaaagagacgtgctgaatcatttctcctcctccttgataagggggcatacgatccagccattcttcctttccataaagcacaccgacgcctgtcggcccataaaccttatgtgcggagaacaccagaaaatcggcatccaagtcttgcacatccaccttcatatgggggatagactgtgcagcatccactagaaaaggtactccatgcgcatgagccgtcgcaatcatttccttgacaggatttacggttcccaatacgttcgacacctgaactacactgactatctttgtacgctcggtgaataacttttcatattcatccagcaacagttcgcccttgtcattcatcggaatgaccttgatggcaattcctttgcgggcagccagaagttgccagggaacgatattactgtgatgctccatcactgaaaggatcacctcatcgccttcctgcataaactcatctccaaagctggaaacaagcaaattgatactttccgtcgtaccccgtgtaaagacgacctcattcgtgctgccggcattgataaactgccgtaccgtttcgcgggaagcttcatgcagttccgttgcctgctgggaaaggtaatgtactccgcgatgcacattcgcattcacagagtaatactcatctaccagcgcatccaccaccagacgaggtttctgagtcgtcgcaccgttatcgaaataaaccaatggtttaccatacaccgtacggctcaatatcggaaagtcttcacgtatcttttgaatatccattttacttattcatcatttacatattgcacatccctggcacttgttcaattcgccacggaagcgtttttctaccaacaggtgcagacggtctttcaatgcatccagacgaatcgtatcgatgacttcattgacgaatgcaaacatcagaagcaagcgtgcttctttctccgctattccgcgtgcacgcatatagaacaaagcattctcgtccaactggcccacagttgctccgtgagagcatttcacatcgtccgcatagatttcaagctgcggctgcgtgtacatacgcgcatcgcgtgtggcacaaaggttgcggttggtctgttgagaatttgtatgctgggcatcaggacgtaccaataccagtccggcaaaagcaccggtcgactggtcatcaagcacgtacttgaataattcattactggtacaattcggtactgcatgatcaatggaggtattattatccacatgctggtttttatcagcgattgccataccgcaaagattaatctcagccccttcgccggctagcagaacttctgttgtattacgggtagttccgttgtgcagcgtcatgccattcagcaaaacattgctgtttgcttcctgcttcacgtacaggttactgatacgaaccgtacttgtatgtgtttcttcaagctcatacatatcgaataccgcattctctccggcaaatacttcgatcacctgtgttgcaaggaagttcacattatccatcgcatgatcacagatcaacaggcgtgcctgcgctccatcttccaggatgatcagcacgcgacggttcaccatgaagttgacatctgcacgaaggatattcaccagttggataggcttctctacgattacgttcttcggaacatagaagatgactccatcctgtgcaaaagctgtattaaaagctgttatgccatccttggaggtatcagccagcttaccgtagtacttcttcaccagttcgggatgttccgcagcgacttctttgaggctgccgaagatgacgccttccggcaaatgagttttaggaagcgctttattataaaatgcgtcgtttaccacaaaatacaaggctgtgctcatattcgggacatcgcacttaaacacttcgtacggattgaccggaatctgaagacggttaaggttcaggccgtaatcaggctcgaaatacttacttatatccgtgtatttatacttctccatcttacgggtcgggaatccgagacgctcaaaatcagcaaaagcagccgcacggggtgcattcagcacttccgcactatgcttgcagatcatggcttccgtctgagagaagagatctatgtattgttgttctacattcatcgttattctcctacttctttcttaatccaatcgtatcccttttcttccagttccaaggctagttccggcccggcagttttcacaatacgacctttatagagtacgtgcactatatccggtttgatataatcgagcagacgctgatagtgagtgatgacgatcgtacttgtttcgggagtcttgagcttattcacgccttccgctacaatacgaagggcatcaatatccagaccggagtctgtctcgtcaagaatgctcagacgcggctccagcattgccatctggaagatctcgttacgcttcttctcaccaccggagaaaccttcattcaccgaacgattggcaagtttattgtccagttcgactacggcacgcttctcacgcatcagtttcagaaattcgctggcagtcaacgcaggcagacctttatacttgcgctgttcattgacagccgccctcatgaagttcaccatgcttactccggggatttctaccggatactggaaactaaggaaaataccttcatgactacggtcttccggactcaactccagcagattcttgccatagaaagtgaccgaaccttttgtcacctcaaaagcaggatttcccaccagaacagaagaaagcgtactctttccggaaccgttcggccccattatcgcatgtacttcgcccggtttcaccgtcaggttaatacctttcaatatctctttgccattaatgctggcatgcaggtcttttatctctaacataagcttatttattttttatcccacgcttccttccaacgaaatagtaagcaacttctgtgcttccactgcaaactccatcggaagtttatttaatacttctttcgcatatccgttaacaatcagcccgatagcatcctccgtcgggataccccgctgattgcaatagaatatctgatcttcgctgatcttgctggtagtcgcctcatgctccaccacagccgtctcattatggatatccatatacgggaaagtatgcgcaccacatttgtcgcccagcagcaaagagtcacactggctgtaatttcgtgcattatcggctttttcagctacacgtaccagtccgcgataagagttctcgctatgtccggcagagatacctttgctgacaatcgtgctgcgggtattctttcccagatgaatcatttttgttccggtatctgcctgctgataattatttgtcacagctacagaataaaactcagccgtcgaattatcgcctgtcaatatgcaggaagggtacttccacgtgatagccgaaccggtttccacctgtgtccaggacagtttgctgtccacccctttgcagttgccgcgtttcgtcacaaagttgtagactccacctttaccttcggcatcacccggataccagttctgaaccgtactgtatttcacttctgcacgatcatgtaccacaatctccacgatagccgcatgcaactgattttcatcacgcatcggtgcggtacatccctccagataagatacatacgaatcgtcgtccgccacaatcagcgtacgttcaaactgtcccgtattacgggcattgatacggaaataggtagaaagctccatcgggcagcgtactcccttcggtatgtaaacgaaagaaccgtcagagaacacggccgagttcaaagcagcaaagaagttatcccgatagcctactaccgagcccatatacttcttcacaaggtccggatgttcccgtaccgcttcactaaaagagcagaatataatgcctttctccatcagtgtctctttgaaagtagtctttacagataccgagtccatcactgcatccacagccattccgctcaatgccatctgttcttccaaaggaatccccagtttattgaatgtctttatcagttccggatctacttcatccatactcttcggtccttctttcttcttcgtcggatcggcatagtacgaaattgcctgataatcaatctccggaatacggagatgtgcccaagtcggcatttccagcgtcagccaatggcgatacgctttcagtcggaactccagcagccattcgggttcatcttttttcgatgaaatcagacgaactacatcttcgttgagtccacgctcaataacatcggtgtgtacttccgtggtgaagccatatttatacttctcctgcgtcagttcctttacatatttattgggttcttcttgttgcatctttattatctaatatatattgttgcgttatattcttagcagcagggaaaaagattcccgcaaacgtttccataggataatataacaatgattcgctcttttttgttgcactaattaacttattatcgctatcgataaactctatcacacagatcacaaggctcgttaacaacagaaatttgagtgctcccaatccacttcccagccaacggttcagccaccccagcgaaatggcttccatcgctttcgtcagcaaggacgccactaacgtgaatatcagtggaacagcgatccagatgacaataaaagccaatacctgtgcaaccgtcatcgagtccgtcacagccggacaaagcttctccgccaacgttgcatacaaagcctttgctgccaacaaaccgacgaccaatcccagaatagaagccagctgacggataaagcctttcataaagcccgccaccacaccggcacctattataataaggataattatatcaatcgttgtcattatctctttttaaaagaaaaaggaggcacggagttttaaatccactctgtgcctccgtatattctcgattcagtacaatttataacgtctgtttcacttctatttcttcgaatgtctcgatcatatcgcctaccttcatgtcgttgcagttcaccagactgataccgcactcgaagtttgtacctacttccttcacgtcgtccttgaagcgtttcagtgcattgatgtttccggtgaagataacgataccatcgcggatcagacgagccttgtcgcttcgtttcacctttccggtcttcactaccgcaccggccacaagtcccactttcgtgatattgaacacttcgcggatttcgatcgtagccgtaatctgttctttcagttccggagctaacataccttccatagcggccttcacctcttcgattgcatcgtagatgacggagtacttacggatatcgacaccttcctgttccgccatcttagcggcagcacccgaaggacgtacctggaatccgacgataatcgcatccgaagcagcagccagtgatacatccgattcggagatagcacccacacctttatggatcacatttacctggatctgttcagtagacaacttgatcaacgagtcgctcaatgcttctacagaaccgtccacgtcacctttgacgatgatgttcaattcctggaagttacccaaagcaatacgacggccaagttcgtccaaagtcaggatcttctgtgtacgcaagccttgttcacgagccagctgttcacgtttattcgtgatttcacgggcttcctgatcactttcaactacatggaacgtatcacctgcagcaggagcaccgttcagtcccagaatcaatgccggttcggccggtcccgcttctttcacgcgctgattacgttcgttgaacatagctttcacacgtccgtagctggttcctgccaatacgatatctcctactttcaaagtaccattcgataccagcaccgtagctacataaccacgtcccttatccaatgaagattcaatgatggatcctgttgcattgcggttcggatttgccttcaaatcaagcatttcagcttccagcaatactttttccatcaaatcttccacacccatacctttcttggcagagatatcttgtgactggtatttaccaccccattcttccacgagatagttcattgcagccagttcttctttaatcttgtccggattagcagtcggcttatctaccttattgattgcaaatacaataggtacacctgctgccatcgcatgattgatcgcttccttcgtctgcggcatcacgttatcatcggctgccacaataatgatcgcaatatccgttactttcgcaccacgggcacgcatagcagtaaacgcctcatgacccggagtatccaggaacgtaatacggcgtccgtcttccaactgtacgttgtaagcaccgatgtgctgtgtaatacctccggcttcaccggcaattacattcgccttacggatgtagtcaagcaaggatgtcttaccgtggtcaacgtgtcccatcaccgttacgattggagcacgtggctgcaaatcttccggagcatcttcttcttccacgatagcctgtgccacttccgcacttacatattcggtcttgaaaccaaactcttcggctaccagattgattgtttccgcatccagacgctggttgatggaaaccatcataccgatactcatacaagttgcaataacctgattgactgatacgtccatcatcgttgccaactcgttagccgttacgaactcagtcagcttcagtaccttgctttctgccatttcctgatcttccagttcctgcatacggttggaagccatttcacgtttttccttgcggtacttagaagtcttgttcttacccttggttgtcagacgtgccaaagtttcttttacctgctttgctacatcttcttcgctaacctcctgcttgataaccggcttcttgaagcgatccttattattattcttcttgttattattattgccctgtccctggccttgaccctgaggacggggatggttgccaccacctttaccggtctgagtattgggtctcggagcagcaaagttggaagttgccacattgttgacatccaccttttctttgttgatacgattccgtttctttctggcagcatcggcattattatcttttacgcccggttttgcctgtttactgtcctctttacggatttccttgatgatagcttccttcatcagtttcttctgatcctgacgaactttttctttttcttcgcgttcacggcgtttttcttccttcgatttcttcttaggacgggtagactggttcaatgcagccaggtcaatctgaccgatgacattgatcttcgctcccagttccggttgacggattttaaacacctcattttctttcgacgcattttcttcagtcggagttgtcactgttgcagttacttctgccgttctttctactttacgttcttctgccttcacaggtgcagtttctaccaccttcggctcttctttctttacttcttccactactactttctcaacttctaccggttttgtctccactgcaggtttcggcgctactactggctgttctaccggagcagatgccggtgcaggtttcggtgcaattacttccaccttttccactttcggctcttcctttttcacttcgggttcaaccactggtttctcaacgactgttttttcagcaacgggttgctttaccacaggttgttctactacaggttctactttcttttccggcgctttttctactttatctgttctccgaccgctgaatttatccaaatctatttttccgacaggtttaaacttaggacgtgcatcctccggtacgactgtcttaatcacatcttccgacttcggtttctcctgctgcttctcgaagccctcgatagataccgatgccttattacgttccttattctgacgttcctggatgaaacgctccgattcaagtctaaggttcttgtctgtactaaactctttaacgagcacagcgtactgctcctcactaattttggtattaggattagcctcaacggtataccctttcttttgcaggaactcaactaccgtcgcgattcctacattcaaatctcttgtaactttgtttaaccttatcgtcatatttaaaatttaatgaataaatggagcgaagaaaattcaatcgtaatgcatattactcttgtgttggttcagcttcaggttccgcctctgtctcaggctccatctctgctgccggttcttcttcaaactccgatttcaaaatacgtattacctcgtccactgtctcttcttccaggtccgtcttttcaatcaacatctcgcgaggcgcattcaacacagccttcgctgtatcgataccgatagccttgattgcatcaatcacccatccgtcgatttcatctctgaactcgtcgagatagatatcctcgtcagccacattctcatccaattcacggaacacgtcgatagtgtactcagtcaacatactggccagcttgatattcaaaccgcctttaccaatagcaagcgatacctcttccggtttaaggaatacctcagcctttttctcttcctcattcagacggatagaagaaatcttagccgggctcaaagcacgctggataaacaatgaaatgttcgatgtataattaatcacgtcgatattttcattgcgtaattcacgaacaatcccatgaatacggcttccttttacacctacgcaggcgcctacgggatcgattctgtcatcataagattccactgcgatcttggcacgttcgccagggatacgggcaatctttttaatggtaatcaaaccatcattgatttcaggtacttccatttcgaacagacgttgcaggaaaacgggagaagtacgtgacaaaataatcttcggattattgttcttgttgtctacgcgggcaaccactgcacgggctgtttcacctttacgataaaagtcgctcgggatctgttcagtcttaggcaacagcagttcgtttccttcatcgtccagaagcaacatttcctttttccagatctggtatacttccgcgttgatgattgtacctactttatcaatatatttattataaatactgtccttttcaagttccagaatctttgaagccagtgtctggcggagattcaggatagcacgacgtccgaacttggcaaagatcacctcatcagtcacttcttcgccttcttcgtatgaagcatcgattttctgtgcttccgtcagcgaaatctgcatattggggtttgtcaaatcttcatcggccacaacttcacggttacgccatatctcgaagtcacccttgtccgggttcacgatcacgtcgtaattctcatcggtgccaaacattttcgcgattacgctacggaacgactcttcaagtacgctaaccatcgtcgttctatcgatattcttcagttccttaaattccgaaaatgtatcaatcaagctgattgtttcttcttttttggccataactatttaaagctaattaagtatttagtatattttatttgctcataagtgaaggtttcgtcctcttcaatcagcttcggacgcttggaaccttcgagttttaccttcttctctacgcctaccgtaaacttctcttcatcggcatctttcaggatacctgccagtttacgtccgtctctggtcactacttccacctcttgtccgatgtggatgtaatactgttgcagcactttaaagggttgtccgataccggcagagcccacttccagttcataatcttcctcttcacggttcagtttcgactcgataaagcggctaagctctacgcagtcttcaatccaaactccttctgcgtggtctatttcgaccacgatcttgtcatccgggctcacggtcacctctaccagaaagtagtcttttccttccagccactcttcaacaatctgacaaacagttttcttttctatcatttattaactatataagaacaaaaaaaggagcttaatcgcccctccacctttcatccatttcggttgcaaagatataaataatctattcgactacaaaacattaaagaaaaaaagtatgaattaacagtcgtatattcgtatctttacgccgcaattttaaaaaccaagagctatggcacatcatctcaacaccaacaaacagtttatggtcggcaacggcattctggcttttgccgtcatttttgtcgtagttattttcatttatatgagcttacgtctgcaacgggaaaaccaggcagaacgacattatattgaaacttatacgatcagcctggtaaaaggatttgccggagattccatttcgctgttcgtcaatgacagccttatcgccaatcaagtcatgcaggaagaagcctttacaatagaggtcggtcgatttgcagaacaaagcgcactgatgattgtagacaataaaacggaaattgcatccgttttcgatctcagcgagaagggaggaacttatcagtttgaaaaagaaacggacggaatcaaacagcttgctaaataagagtctgcttaatatcaggagctccttatcccaagcaccttatatctctgtgcgatacttcttcaattctttacgcagagcaagggccttgccatctgtgaaccggtccagcaagtcccagaaacgctcactgtggttcatctcacgagtatgacacaactcgtgcagaagcacatagtcaatcaggtgagaaggcaacagaacaagataataggacagatttatattttttctcgctgagcaactcccccagcgtccctggctggagtttatcttcacactggcataaggcaatccacattgtgccgaaagatgctccaaacgaggaggaagaatacttttcgcattccgcctcaaagattcttcgatcactttacgcaaccagttctgtagattttcatcagtaaaatccgcttgaggaggacatacgatctgcatgacacccaatcgcgaattagccagaaactgctccttttcacctaagatgagagatagtttgaaatgctcggcatcaatcttatagtttaagtcaatcaacggacgggcaaccttctgacgggaaagcagcaacttacaacgaagattctcaatggcacgcttcacctctttcgtcgtggtgccgggaggcaccgaaacgtagaccgcatcgctttttgtacgaaacaccaaactgcgcgcacgtggattgacacgcactatcaaacttcccagttcctcatcttctatcactgtatccattttctcctccttaaccgatgctgcaaaaataataaaaaaagaagccggtggcgaaaaaagtgatattcaatgcaactttatagcaactcgcaacgtctaatccatatatactcatattaaaatcaactataaattatgaaaagaaacacattgactgcatggctgctcgggataatcctgatattctccgctacctcctgttttaatgaccctattgtgaaaggcagtaaaaactacatcaccaaaaaagagaatctggaacacttcaatgacatcagtatgtcgggaagtgccaacatcacctaccagcaagactcctcctcccgtattgagatttacggttcggacaatatcgtagagctcctggaaacaaaagtaaacggagaaacattgaatataaagtttaaaaagaatgtcaatatcatcgacaaaggcaaactagagatcaaagttttctcaccagacctgaacaggctaacactcaacggatcgggtggcattctctttgcgaacggcattcacaccaagggagatcttaaagtaacgattaacggttcaggcaatttaggaggaagtacattcgacaccggtcatctggccattgcaattcatggttcgggcgatgtcaggctcaaacaaatcgacagtaagacctgctctgcaagcatttccggatcgggtaacatcacccttaacggcatgacaggcgcagcaaagtacaacatatcaggatccggcaatatcaaagccgccgatctggaagctacagacgtatatgcaggtatctcaggttcgggtaacatcagctgcttcgtcaacggcaaactaggcgggcacgtcagcggaagcggcaacgtcgcttacaaaggaaatcctcaggctattgatttcccccacaagaagctccgcaaactggactaaatccgtaaacatcccaaaaacataaaagggctactgcatctcgcggtagcccatttatttagttagtttcattataaaaaatttgagagaattgaaaacttcacagtttcgctttcgatgttgttttaattaaagcacactaactatattatatgtttaaagcaaatgaaaatgtcattctttcataacctgcaccttgttgatctttgcaaggctgtcagccaatgcctgatctgctttcagctcatttgacagagctaccgacggtgtggtcacttgtttaccaatggtatccgttgccaatactcttccgtcatctccggaaaaagaatgttgcgctacatttcctaatgaaaggataattgcaatcacagcagcagctttaaacagggggatgaatcttcctgtcagtgtcagacgctttgccttcactaccggagtttccacctgcgccagaatacgtgcgtcaaagtcttcacccagtcctacctcctgctgaacctgctgataaacaaacaagtttttatagcggagcaaatgagcgggtacttcctcctttgagaagaagtcgcgcaacacagattcctcctccacggaagtttcgcattgccaatatcgctccaggagctgttctatatccttataatccatattcgtcaatttctaaatacctttgttttaccttttgtctggctctgaaaaggttcactttcacttgttcctctgtcagattcagaagggttgcaattttcttatagctttcaccttcaatgtccctcagttgcatgataagccgctgtttttcgggaagttcgttcaccagtctattgataatgttcattttctcatcatgaaccaactggtcatacggactgtttgcatcaggttcttcctccatttcgggggtgatttccacattctgagcttctttcttctggctccggtctatagccagattctttgccactatcaggcaataggcttcaaccgattcaaattgcgaccactcatcacgcttgttccacacccttatcatggtgtcctgaacgacatcctcggcttctgccctatccagggttattctgagcgccagtcgaaagagtttatccttcaacggcaaaatatcgtttcggaagctgatctcttgcatctctataataatgacgggctgggatacgaaaagttacagacgcccattacttttttttgaattatttttttatccgcgttccttcgttgtctttaatcgctgatgctaaggtaattacaacttctgtaactcctgcattaattgcttcaaaagaattctccaacttaggaatcatgccaccttgaataacgccgtcagcaacgtattgttcgaattcggcacgggtaatctcagggatcacactatcgtcatcattctcgtcacgcagcacacctttcttttcgaagcagtacaccagcgtcacgtcaaacagcgccgacaaagcctttgccgtctctccggcaatggtatccgcatttgtattcagcatattaccttgaccatcgtgtgtcaacggtgccatcacgggcaccactcctttatgaaccagatcagccagcaaagaagcatctaccttctccacatcgcccacgaaaccataatcaacctctttcaccggacgctttaccgatcggatcacattcatatccgccccagtcagtccaagagcgttcactccacgggcctgcaacccggcaacaatattcttgtttaccagaccaccatacaccatcgttaccactttcaacgtttccgcatcggtaatacgacgaccatttaccattttgctttcaatacctagttgtgcggcaatctttgttgccgagcgaccgccgccgtgaaccagcactttatgtccgctgatggcggcaaagtcattcaacaactgaagaagggtggcttcctcttctacgatttttccacccaccttaattacagttagtttttccctcattttttattcaattctaataagtttgccgaatggagaactcagctccggcaccttgtcggttattctaagtaagtatagccgtaaagtcccgaacgatagttggacagaaactctttaccctcttccaatgatatctttccttcttttacagacttggtcacccatgtttcaagggtacgtaccagttttttaggattatattgtacgtaatccaacacttccgctactgtctcaccatcaataatctgttcgatattatatcccttttcattcacagaaacgtgaacagcattcgtatctccaaacagattatgcatatctcccagaatctcctgataagctccgaccaggaaaacagccagatagtaaggttctgttttcttcagactatgcacaggcagataatgagccacattccgggtagaaatgaaatttgcaatctttccgtccgaatcacaggtgatatcctgcagggtagccgaacgctccggcttctcatccaaccgctgaataggcataatcggaaatatctgatcaatcgcccaagagtcgggcaaggactggaacaatgagaaattacaaaaatatttatccgccagcaacttggacaatccccggaattcatccggcgcatgtttcaagcctccggcgatctgattaatttcccgcgtaatggaccaatacaaacgctcgatctgagcacgggtcttcaaatccacaataccatgactgaacaagtcgagcgcttcttcccgaatctgttgtgcatcatgccatgcttccagcatcttattctggttcaacgaatcccagatactgtacagttcctgcacaagctcatgtgcatccggagcgatttcctcttcatcatcccattccggaagagtagctgtttcgagcacctcgaagatcaagacagagtgatgagccgtcaatgcccgtccgctctcggtaatgatgttcggatgcgggatgccgtttttatcgctgacatctaccaatgtagaaatggagtcattcacatattcctgaatagaatagtttacactaccttcactattggaagaacgggttccgtcataatcaacgcccagtccgccgccgatgtccacaaactccacattgaatcccatagagtgaagctgcacgtaaaattgagaagcttcgcgcaaagccgtcttaatgcgacgaatcttcgtcacctggctgccaatatggaaatgaatcagtttcaggcaatctttcaagcccttgctttccataaagtcaagcgcttcgagcagttcgctggaagtcagaccgaacttgctggcatcaccgcccgattcttcccattttccactgccggaagaagccagtttaatacgaataccgatattgggctgcacattcaactgcttcgccattttggctatcagtttcagttcgttcatcttctctactacgaggaagatacgtttgcccatcttttgggcaaggagtgccagttcgatataactttcgtctttatagccgttacaaacaatcaatgagtcagaatccgtattgacggcaatcaccgcatgaagttccggtttggaaccggcttccagtccgagattgaatttctttccgtggctgataatctcttctaccacaggacgcatctggttgaccttaatgggatagatgataaaattctcggctttatacccgtactcttcggcagcctgcttaaaacaggaagacatcttttcaatacggttgtccaaaatatccgggaaacgcaacagcatgggagatgccacatcccgcaattgtaactcgtcaaccagttccttcaggtcgacggtcactccatctctccgcggtgtaacaacaacatgacctgcgtcattaatactaaagtacgaagtaccccaacccgtaatgttgtagagttcttcagaatcttcaatacgccactttctcattttctgttattcagtgtttttagtaaataattggatggcaaaaatacagatttatctacaggctgccaattaattggatattatttctttcaattggtctatataaccggtcttaatttatatttccaacagttcctgcaggcgttgcacagacgattcaatctgccagcggtcttccagttcgtccgcattaaagatatattgcgcctgcgtataaaaaggtgcacgcttttcaagcgcctgaatgatgaaatccattaattcatcatcttcctttccctgaagaatgggacgttgctgcttggcaatacgcaagcgtctgaacagcacatcgggatgtacattcaagaaaacggttttccccgtccggttcataaactccatattgtcataaaagcagggtgctcccccgcctgtagagataacgacgttctcaaactcagctacctcatgaagcatatttctttccaactcacgaaatccggcttccccccgttccgtgaatagttctccgacagttttatgaaaacgttcttcgatataccagtccagatcaatgaacgggacattcagtttgcgggcaaaagccttgcccaaagtagtttttccggcacccatatagccggtaaggaagatacgaaccataaatgattaattttgctcacaaaattaatcatttaatgaataatgaagaatgattctctattatttaaaaacttttatccgttcttccagtggctggaactctttttctcccggcttattgacgggcactccaaacggcatttccgcaatcagatgccaatgtgcaggcaaattccatgcccgacgcacctcatcatcaatcaacggattataatgttgcaaggaagcaccgaagcccacatcttcaagcatgacccaaacagccagctgatgcatcgctgaggtttgtaatgaccatccggggaaattctcctgataagacgggaaagcttcctgaagccccttcaccaccttctgatcttcaaagaacaacaccgtaccatatccacaggcaaaggaattgtcaatcttttcttcggttttcgcaaacgcttctcccggcacaatcttcctcaacgcatcttttacaatgttccataactttttatgagacttgccaagaagaagcaccacacgggtagattgagaattgaatgccgacggcacgtgtctcacagccagattgataatgcattctatctcctgatccggaataggtgactggtcggtaatcgaataataagtccgacgattcttcaaagcttcactaaaagttctttccataatagctcctttcttaattttattttcttaaactccttataaattagaacaagcttctctgccaacttgttcgattccggaatatatttgtaccttcgcaccgtcaatgctgttgacataatcattcattatcagaaaatggctaaagaaaagttctacgtagtatgggaaggagtgacgccgggagtatatgcttcctggacggattgccagctccagatcaaggggtatgaaggtgcaaagtacaaatcgttcgacacccgtgaagaggcggaacgtgcactggcctcgtcaccttacgcctacatcggcaaaaatgcgaagaaaaaaacggaagctgcccgaaccggttccgatacactgcctgcttccgtcattgacaatagtctggcagtcgatgctgcgtgcagtggtaatcccggcccgatggagtatcggggagtacacgtggcaagccgccaggaaatttttcatttcggcccgatgaaaggcacaaacaatatcggagagtttctggccatcgtgcacggactggcgttgctgaaacagaaaggatttgatatgcccatttatagcgacagcgtgaatgccatcagctgggtgcgacagaaaaaatgcaaaaccaaacttccccggaatgaggaaactgaagaactgtttaaagtgatagaacgggcagagaagtggctcagagagaacacttacactacccgtattcttaaatgggaaaccaaggtgtggggagagattccggcagacttcggcagaaaataatagccgggaagtctattctgcgacttgatcagcagcctgttccttcttatgtttaaacacaaagcggagcatcagaaaattagtgggaacagccacagcgagcacacacaagggagctatctcctgatctacattcagatacaggaacaaattgaacaatcccatatgtatcagatagttcaccaaatggctgcctccaaatcccaaagcccttttcaaagaagggttgctacgaaacgtgaaataagaagtcagaaagaaattacagataaaactcgtcacatagcctatcgtgtaggcaatattcaagttggtcatttcgtattcctgcaacagataataaaccccataatgtattccggcggccaacgttcccaccgtgcaataacgaataaactggtagcgtttactcttcgattgaaatactgattttacaatttccattagtaagtagttttagttttatagttcagttcagatgtttcattttcattcagtcagatggacgcgcaaagtcctgagtcagttgttcccacactattttcagccatatcaaagtacaaggcagagccttcagagcataaggtttcacatattccactcttatgaatcttggaaaaagatcggtagtagacaaagaagtcagtagaatacagaatataagcaatgacagattcaatattggtgtagcagcttttgtcggtgtctttacataccagattccaacagcaatcatagcagtcagatagccataggtttcagtgccggtgctaaatagtaccataaacaaaagtgcagaggatagaaacaagaatctgaaagattcatttccatattgccggacgcgtaaataaggaagggcaaacaaaatcattccgggcacgattatccataaatcgctgaatgaagctcccgttatccgatgtaacatacccagcaaagatatgttttgattgacgctaaactgattcagcccattcttatagacaagcacatcgaaccattccttatacgaatgaacgacatattccggagaagcatagagcatgggaagcagaaaaacgatcactgcccaaaagactaatccgccgacgagtttcattttgtgtttcgagaataaaaagaaagccagtccgactatcccataaagtttggtcatagtccctaatacaatcatcaaagcagcccaaaaatccttttctttctcgatcagcacatacgagaatataatcatagcggtaatacctatgctatattgctgagacaaaacagctgtaaaaacgtcatttacagaaactaatataacaacagcaaattgccactttttcaaatctaacttgctgatagcataataaaggaaaccacaatttaccagacaccaaaagaccatccccaagggtctgggaagaaccgcaaaaggagaaatcaatgcagtgaaagaaataccatacagaaaaaaatctttctgttcctgaagatattctacatataaaggagaagaagatatcgcatgccaaaaagactggctaaatataacataattgctatatgtccccttcatcatcaatgataaactgcaagctaatcctactcccatccacaagatgaatagaaagacgggattctgcacatatcctttcaacctctccaacatatcatcaataagttttttagttcatttacaaataccccctttttcatatcaggcaacatcacttcgcctcttaagtctacaggaacctctttgatgaaggtggtatcatcaagagaagccttatatataaactccgtatcaaataagaactgtttaatacgagtggacgcaagaaaagcttttcccttacagttaaacccctttaatcccccctgcgtatctgtgtgggtcagccctaacagcataaagttcaagaaacgtgaagcatgactcgccaactttctacgggtagaaagttgtgaataatacgtatgattacgatttgctacaactacatcatacccttcctcaagatatttaatcacttgacaaacagactcaatcttatatggaaaatcataatctgtataaagagccagctctgaatcagaatgtgctataccatcacgaacagcagctcctttcccttgatttatcttattgtctacaatgatagtgttgggtaagttatttgtcaaacgaagtacagcttcttccgtaaatccgcgtttggaaccatcatttactacgataaagcgaatattgtacccgttcagcatcccttccaactctttatgtttttcaatcagttgctgctcccatccttcatgaggattataacagggcaatatgacgtcaatccgttcatcatcttttttatgtagaaaaggagttggggttcttgatgtatagtcctgagttaattgttcccagatgattttaaaccagataatagcacatgggagagctttaagtgcaaatgaagttatgtattcagtcctgaaatgttttgaaaaaagaatactgcttgaagacgctgccgtcaacacaaaacagaatagcaataagcatgtattcagcacaaacgattttttatacgttggcgtacttacataccatatacccacaccaattagagcacccacatatccacattcttccgtccccgtactaaacaagaccataaataacagaactgatgccaaaaacgaaagccgaaaatttctattctcatattgtccaatacgcaaataaggcaataagaataaaacaattccaggaattatcagccacatatcgctatattcaacagcatgagtaatctttcgaaccattcctaataaagagatattctgataaaagctcaactcattaacatcattcttaactacaagaatactaacccattctttataagaatcaaatacatattgtggagaagtataaaacattggaactacaaatagaacgaatgcccaaaatagaattccccacagaaaatataattttcttttagagaaaaggaaaaaagctaaccccacaatcccataaattttggttaatgtgcctaacacaatcatcaatgcagcccaaaaatctttttttctctcgacaagaataaaagtaaaaagaatgaaagcggctactgctgcattatactgctgagtcacaacagataaatataagccattatatgacaaccaaatgataatggctgttttccatttttcaaactctaacttctttatagcaaagtacaataaaagagcattacacaaactccacaaagcagaacccaccattgttggcatgattgaaaaaggagcaatcaataaagtaaaaggaatgccatatagaaataaatcaaaatattctttaggatattctacatataaaggcgtttgctccaaagcatgaaaaaatgaacgggaaaatatcaagtagttatttgcaagtccttctgtccagcttacccaaaatcccctgatagccaccccaaaccacaaaattgctaatacaataggattttgcactaactttagtataaatcttattatatctttcatttcattatatccttgtttagttttatataatctataaaacgaccaaaactaacattctttttcctaaaatataggatgaaggcatccagccttttttccattccttctcctgcatgattccttataataaatggcagtttccattccgggtgttcatttaacggataaaattcccacggatgaaagtatgtcacaaaatatccatcatgccgatgagtgtatttacacagccaacgataaagtgaagcaggcaaattatgacatgaaagccaaaataaagggaaacgcagcaaaggagtaactgatgccggcatttgcatcacacggtcttttataaaaggagtacgaggagtagagagccgcatatatcttcccgggataaatgtcggattcaaggaagaattatatatataccccgcctcatatacagctttttccgacacaggcatcatgcgtgcctgccgatagccataaactttggttccggtgatttcctccaactgatccttcgaccttttcagatcttccactttaaaggtccaatgatagaagccatgagaagcaatctcgtgacctccctcctgaatgcgctttattatatcaggagcatgaagagcaaaatttgccgtacagaaaaaggtcgcttttacctgattccgttccaagcaatccaaaattcgggtagtcccctctacagaaactttaatttgctcttccattgatatgtccacctgatgttctttgggcacatcaaattcctcaatgtcaaaacttaataaaatcattccaatattagtctagtttacgtttgttgctgtgagttgctgcaaatatgcagccacagcctataatgcttgcatatcgtttagtcttttataataaccgtctaattccaataattcttcgtggcgcccacgctctacaatttccccttcatagagcacacaaatctcatctgcatttttgatagtagaaagacggtgagcaattgcaatcgtggtacgcgtcttcatcaatctctccaatgcttcctgtaccaaacgttccgattcagtatccagtgctgaagtagcctcatccagaatcaggatgggaggattcttcagaatagcacgggcgatgctgacacgctgtctctgtccaccggaaagtttgccgccacggtcaccgatatttgtattatatccttccggcttttccataataaaatcatgggcattggcaatcttagcagcctctatgacttgttccatagttgcattttctacgccaaaagcaatattattgaaaaatgtatcattaaaaagaatggcttcttgatttacattgccaatcaaactgcgcaaatcggcaatacgtacatctttaatacttgtaccatcgatggtgatatctcctccttgcacatcatgataacgtggcaataaatctacgagcgttgattttcctgagcctgactgtcctaccaaagcaactgtctttccctttggcactgttaagttcacatgtttcaacacttctcttttaccatcatagctaaagcttatatctttaaactcaatccgatcattcattccagtcaatggtttcggattaggaatttctttaatattattctcagccttcaatattttgtccacgcgttccatagaagcaagccccttggggatattgtaaccggccttagcaaagtctttcaacggatttatcacgctatacaaaataaccatataaaatataaacgtcggtgcagtcaatgacgaattatgccctaaaatcaaagcaccaccaaaccataatacagatacaatcagaattgttcccaagaactcactcatcggatgagccaaagcttgtcgcatagccactttgttgactgcatcacgaagctcattactgcacctcgtaaaacgatttatcattctgtcctctgcaataaacgctttgataatacgcaaaccacccaatgtttcttccaactgagacattgtatcactccacttaccttgtgcctccagtgattgacgctttagttttcttccgaccttacccagcagccagcccatagccggcaataccaaaacggtgaaaagagttaacttccagctggtagcaatcaatgttataaaatacaatataatcatgatagggctctttatcaacatgtccaatgaactggtaatagagttttccacctctcccacatcaccactcatacgagctataatatctccttttctctcctctgagaaaaagcccatcggcaaacgcattaccttcgcatataccatgatacggatatccctgacaactcctgtacgcaatggaatcatcacagctgaagatgcaaaataacaggacgttttaaataaagtcatcaaagccagaaacagtcccagaaaaatcaaagcagtagtaggaccattatcctgaatcatttgggaaacataataatagaaattatttatcgcaacatctttaaaaccggcagttccccattccatatactcatataccttattattctctcctgttttaaacaaaatatccagaatcggaattaacaaagtaaatgaaaacacattgaatacagctgacaagatattcagcaaaatagcccatccgatatacttcttatatggcgacacaaaacgtcgcatcagttgcaaaaattccttcattatttgaaataaaataagttaaggctgcaaagatacaataaaactgtctaacagttgaaggtttctttcaataattaatacgaattatataatagccaccttcttgaccatttattcgtctatttcactccaacactactcattatcaaaagatatgggcaccacatgataataaaccccatgagatctccggtacgatttcactcccaacttttgcagaatacgccccaaataagatacttgccgaggtgaaaacttcatcttactagccttctgtattcgttgtagcaaatccgcagcaagcaaccattctcctgcctcttcgtcggccgccgcccgataatatacctgaaacaattgctcgatcgcaggagactgctcaaactcctgattagactccgtcataatagcttcctcttcttcatcaaaccaataccgttcatttttataaagcgccgtcattgcttgtgcataaagctgctcataatcaatgggacgcaccacatcaatcactcccgtcacttcgacgccgataaaacggcgactaccggaagtgtctgtcagtaagtctttatgattactcgtcccgataaaagaagcataccggcggagtgattccacagctgacgcattcgggcgacgggtattaacaaccggtttttgcaaaatatgtttaaggaatgactgctgattgacacctatctgatcaaactcatccatattgataagaagaaaacgattcagatacaactcggcgtcccttttacggctaaagtcaatgctgtccgtataatacgcctgcaaacacggaggcagaatcagacggcaaaaggtagacttacgataagcctgcggaccgattagaataggtgaagtactgttcgcatgatttttgtcaactccacgccagtgcgccactgtactgagaaaccaacgacgaaagagttgtccccaatgaggattatcacaaggaactctttcagccaggtcacggatgtggtctttaccgtcccaatggggaagatcataaagaaattcctcgacagggtgataaacgggaacatgatcggaattcagatatcggaccacatccttatcccaaagtttgatgccctcatacatcgcattcatcgtaatacttgccatcacccgtttgtctatggggcgaaaataaaagttgaagctgttccgctcacggtattccacgctcgaagtcagcatattgaaacgaaactcatagcggcgtttcataaactcatctgtctgcatgacaaacaattgctccggcagcaaactacttttatcggcaaatccctcacacgtaccatacacgttcttcaccgtctcgcgaatcaggaattcatctttcggtaaacgataatgagcacgtgcccatcgcacggtgtcttcctgtggaataccggcacgaaaacactgctcagccagacaaacaagcaatgagtgtatatcatcgcctgggcggtatcctttttgctcggccaatgcccgggcaaatgctgcttcaaaaagaacagaaagtgcttcgtaactatcatatccgggaacaagccgctgtaaaggagaagcctgcgcctgtacctgctctcgataggtggtttcccccggcaaagatgctggctgtttcagataaacaggcatggcttcgggattaaaatacagctccgggtcgaaagtcagtcggcaatactgttccagcgaaggctctcttaattcgatatcaaacgggagttggggctggtaatatttcacagccagacgataagcatgcgcatgaaagacttccgcctgttcgcgattatcaggcaaacggttgtcgggatacgtaaaacgaacccatatctttacagactttcctgaagaaccgataaaagcaagatacgtctgaggcaactccttcacacactccttcacctcatcagcttccatacgtccggataacccgttgacctgaagcataacgattccattatattcggccatcgccatcaccccgttttttctgacaaaagctgccgccggaagtatcttcgggaccctctctatataatcatttttatcaccgggaagtatataaggcaggacttctctcatattagagaccagttgtgctttagtttcctttttcatctgctctacgagctgttcaatcttcaacgtgcgcatcgtatttactttgccatcgtctctcacttgtgttattctcattttttctttcgctgtttgtcctgcttgcgtgtgtagggcaatatatattttgcacaaaagtactgtaaacattctatgtaaacaagtttctgatcataagtttcattcccatctcctctccctctactagaaaagaaaaaatatattttagtctcacggtctcactacttttacataatcaccaaataattaatatattataggatgagagatactttttacagaggtatctctcatcatttcctcactgaaattactctattctaacctgtctctcaccttcttttgattatctctcattctgctttcgaacttccattatttaatttcagacctatacatttctccttttagaagtactttaaggcgcatatattttaccattcattatcatgcaaacaatcctataattgcttgttttacaactattattgtcgtatctttgaaggacgttattcatcatactacccgggtgaaccaacctgttcactcaggtacacagatatgttctcgaaggtgcaatgatcggttcacccgggtagaacgatgaagatgtcggtaagatgacacgcagataaaggctttaaatgccgaagaaataagtaacaccatatataaacaacagataaacaacaattaagatggcagtacaattcgaattttataagaatcccgttcagggagaagaagagggggaaacaagttatcatcccagagtcgtgaattttcaacacgtgactacccaaagactggcagccgaaattcactcggcaactacctttggcaaggccgaagtggaagcaatgttaatggaactcagtcggtgcatgggaaatcacttacgcgaagggcaaagagtacatcttgacggggtcggctattttcagatcacattacaagcaacagagccgatacattccatggccgcacacgctgacaaagtaaagtttaaatcggtcagtttcctggcggacagagatttaaaaggtgagcttataggtatgcatgcacaacgctcaaagtataaaccccactcggctaccctctcccaggaagaaatagacaaaaaattaaccgggtacttcgctacgcatacggttttgacccgctctgatatgcagtcactttgccaattcacacacagtatggcggcacgccatattcgcaggttgaaagaagaaggttctttgcagaatatcggaattcgtacacaaccgatttatgtgccgtgtccaggacattatgggaaatagttgtaaaatagaatgagagatacccaaaaacagcatgagagatagactaaaatagagtaattccagtgagaaaagaatgagagatacctttgtaaaaagtatctctcattctataatatcttaattatttggcgattatgcaaaagtagtgagaccgtgagactaaaaaaattcttttatagcggacttagatataatcacaacacccaaagaggaagcccaaatgagcttcctcttttacctaatatcgcttatggaatatcttgaataattccttcccaactatcaatccctattcgagataaatactgttcaaaataatcatcttcttcatctgtatccgctttttgataggttgtccatacaggcttggcttcaccattatgaggcgcttcggtatacttacgcaaacccaaacaggcaccatctcccaaatgatcaaaccagctatgccattgtattccatcaatgccgtccagattattaatcttcttccagccataagcaaagccggcagcctgatcctgcaaatcattatcactataacttggagaacatgttcctgcctcagaaagccagacagaacgtttcactgttcctttatatttattggaggagagacttacccacttatccaaaacctccaaatttttcaaggtcacatattgcgtgtccatagagtaagttgcctgttcatcatcccaagtgcacgggttacctaactgagccgggtaactatgacacgccaatgaccaaaagaaatcaccctcactttcactgaactgattcataaagtcgagcatatctcttactttataccaaccgccaccggcagcgatattccatccatgcgagaaagagataaagacttccgagtgctggtcatattgatgcgcaatattatagcacatacgcatcgaacggagataagtgtccataaacgtggcaatcggtttgtcacccatattggtccaatgacttcctccatccacttcgttatgtataatccagtgcgctatgcgcatattaggagcactatatctttttgccaggaagtcaagtgctgcagcgtaacaatttgtagactctattgtggtcatattgggcattgtataaggagctataccattaaaatccggatgtttcaaaagagtaccggcatctccggtaggaggaaccagcaaaatacctgctacagagattccacgtttactcgtttgctctaacacagcatcaaatgaactcttcatatatccctcattaaaataatatgtcctgccaccgtaagtatgcggaatatctccttcctgttgagaaagatgcatgaaatgagaaatagggatgttgatggtggcactggcaatatccaaatcatccaaatcagatgcaaggaatccatggtttatcaatcctcccaaccccttcttagattttaaaggaatagcctcaacactttgttttacgtgtattttatccacgttcgcatagcgggcatgagaaacaatctcatccttggaagctccttctttgtatatagcccacttagacaataaacgatcatactcatagtcacctatagtaacatatctatccaactgaacgttaaaagagccgtttgataaaggtgttttattttccaccttttctactttgagcatatccacaaatggaggaatctctcccaagaagaaagtaccttctcccgtatagttaccttgaatactgatcgtactctctcctaccaccacatcagttacatggcaatcatattctttattcagataatctttaattccttgttcgtacttctctttattaagtgcttcattattctcgtcctcttccgcctgtttttcctcatcattcatcatacgcaggcgtatattacgcatttgtatgatattattaggctggtctccaaaatccagacgcagaaaatctttcacttttccccaatcaaactcctgtctatatttctttagacgaacgctgaatgaagcccattccgtagaagcaggaacggttcccgcactcatgctatgagtagcatcaatcccattttttgcatcagcaaaaaagagttcaaggttactcatccccatttccgtctgatattcaaattcaagaacattacattcttcgggaacatcttctttaaacaaaccggcagtcgcccaaggatcaccattagtagtttctatcgtataactactgtcttcattctgagttaacgttactcccgacttatagggcccatccaataacatataaacaggcgggataacaatatcctcaggaggaataacttctcccccatcatcttcaataaagtcatcattacaggaagacaagttcatcacaaaaaatgccattaaaaacaacatgccacatcgccctagcaggcgttcaggccttctcgtaaagaaagctttcaaattttccataatttcagttttagttaataatgtcgttgattaaaaattctcaataatattccaatcaggaattccaattaaaggtaagaattgttcgaagtattcatcttcttcatttgtgcctgcttttcgataaacttcccacacaggtttggcttcccctctgtaagattcatccaagtatttacgcaatccgaagcaagctccgtctcccggatgatcaaaccaattatgccattgtagcccatcaatcccttccaatgcattgattttcttccaggcgaaagccaaactagccgcttgcttctgaaaatcttcatccgaataagtaggagaatttactccagcctcagaaagccagacagagcgcttaatagtccctttatatttattttctttggtaagcgcccacttactcagaacttccagattcttaaacgtaataaattgggtatccatggaaaacgttgcgttcggatcaatccaaacacatggattcgtcaaatcctgagaatagctatgataagctaatccccactgaaagtccccttctacccgactataaacattcaacaaatcaatgatttccttgcttgtatagagccaccatcccacattcgctatctgtgtccaggaatgtgtaaaggagcccaaaacctctgcctgcttatcatattggcgtactatattataacatatacgcattgattttatataggtgtccgtaaatacagtaagaggttttactcccatatttgtccagtctatacagccgtctacctcattatgcataatccaatgagctatacgcccgtagcgattgtccgccgtacaatatcttttcgccagaaaatcaaatgccgccgcataacaattcaccgattccaaagtagtcatattaggcattgtataaacccctctttcataatccggatgttgcaacaatgcccccaagtcagggtctacacatttagctgccggttcgacaagaatgatggcagcaacagcaatattccgtttggctgcttctaaaagaggaacgtcaagcacagtcttgaggtaaccttcatccatataataggttcttcccccataagtatgcgcaatatctcccgctcttggcgtcaggtgcataaactgagtgatacaaacattaatcgtagcactgcttatccccaacgaagtaaaatccgatatatattggttaggaataattccacccaaccctttctttgaagtcagtttgatagccggaagattctgaaacgcatgaatttcatccgcttgatgcgcatgagaaaccagttggtctctttctactccctctttataaatagcccactttgacaaaagacggtcatataacgctccatccctttctacatagcgctctaacttaatttcaaaagatgaatcttctaacttcaacttataaggagccttcttcacatctatgatatccaaataaggaggaatctcacctaaaaagaagttgccttcaccggtatattcaccagtaacgcaaacggaagattccattactgagacctgagaaattttacacgaatagctttttcccaaataagcattcagatcttgttcgtgttgaatatcttcttcgtcaaaaggagattcaggtatctcctctttctcttcctcgtgacaggaagaaacaatgaaaggacaacaggacagaaacaaaagaataataaacgactcaatataagcctttctcatttaaaaaaaatgacttttcaatagctccataagtaaactgtaaaagggtttaggtttaattatacaaatatagagctattaatatgaacacatgcaaaatcctacttctttttacaatttttatacacagcaaaaaatattactaccgaaaaacatcttaactgacaatcatctattatcacaaatgaatactaatcaatcagcaaagctttcatcggctttttgtctcccatataatagacggaaatacaaaaagcttcccaatccgcataccctccgaatcgccagacataagaatcgacccaacagggaaactcttcgtatctgaaagaaacaacaccgtcttctgagtggagataagtggtcactatatcctgaaattgcgcatgagaacgttttgcgcatggaatgacaaatgccatatgcaaaacgatcgcacttgctgccacaattgatacacttctacaccaaaccgcattaaatgaagtctgttcactgatcagcttgattaaaatcacaacagaaaacaactctattccaaacaattgccggacatttcgaaatcctataaccaagctaaaaacaagttcaattaagattacataaaaataaagttgattatcatagaaaaactttctcagggtatgattattgttgtttctcttttcacgaaaaaaagtatataccagcaaaaacagaagaacataaaatgcccgaagctcaccgattatcaataagaaggtttcccagatggaaggatgatcaaacgacgcgcgcccgcgggcagcaggcgataaacacaacaacaaggtcccaagccaaaagccggcaaccaaagctatttcaggtgatttaggcttcctcttattatattgtacacaataaataataaacaaagccccggaaatgcctataaccaaagattcatgtgtccaaccagaaatgacgcccagcaaaaaaagaagaaaagcaactccccaattcaccctttccatttgccgcactttagtataaacaagcagaaaagccaaacaaagaacggcgctccaagtataattgagagcaccactcatcagtaaaaagagatcaaccgggcaaggcaataagaaccatataaagaaaactgcagcaacccagtaaccgaattttgtcagatttctttttccggaaatccatataaccaacatattaagtaacagaaaagcgaatacattgattaaattaaaacaattctccccccaaagtccggcaaacgactgctccagaatatgaggaatggtacggccattcacataaaaataatgattatattgcgaaaaaataacatcggtaaatgatgatatcttctgctcaaatcctatcgatgcgccttcaaagaaagacttagctgccacaggagtcaaatagaatgaataaagataatcatctccacatatcggagtgtacatattcatcaggtaaaataaacttcctattatcaacagaaatgcgccaataccaatccgaaccgtttttttactcataatcttagctattgtttcacaccattatattctcttgcaatgtaggtaggacgattctttgtttcattgaaaatacgtcctatatactcccctatgactcccaaggacagcaactgtatcccacctagaaaaagaatcacaaccatcagagtagggaaaccctgtacaacttcgccccatatcaatgttttaaacatgataaagcacatgtatatgaaagcaaccagggaaactataattccagcaaaagtagaaatgcgtaaaggagctacagtaaaggaagtcaccccttccacagccaagctcagaaggctgaaaaagttaaacgaagatgtaccggcaacacgatcttcctgctcgaatttgatctctttcttacgaaatccaatccagcaatacatacctttagtatatctttggctctcacgcatctgtttcaaagcgtttacacaacaacgatctaacagtctgaaatcaccgacattcgggagaatctccacacgggtcgttttctgcaataacttatagaataacaaggacagatatttacgcatcaaactctccttgcctctggttattcgctttgcgtatacatcatcatacccttcttcccaatatttcaacatttcagggattaagtgaggaggatgttgcaagtcagcatccataatcaccagacaatcgcctgtagcataatcgaaaccagctaacattgctacttcttttccaaaattgcgcgacaggtcgacaaaattaattctctcatcttgtgatctcaaaaatttaataacttccaatgttttatcatggctgccatcattaacaaacaaaatctcccactcatattctgcataagaatccatcatttcttttagcttcgaatagagctccggaagagagagttcctcgttgtatgcaggtattaaaacactaactttactcatatttttttagattttagaacaaaacgaacaagaaggaaattaaccggtactactaatgcaaacacaggaagaggtgcccatctctcgggaactccgatccatataaatagcgacaacagcccgatatgcaacaaataattgataaaatgactgatgccaaatcctattcctttcctaacagtaggcttagtattaaaggtgaatatattagacaagtaaaaattcagaataaagctaataacataaccaatagtatatgcaatagctggtaacatcagtacacataaaaagaaataaataccataatgagtagcagttgccagaataccaaccaatatgaaacgaacaaactctctacgcttattaaaaacagacatcatccaatactcttttattgattttgatccaactacctacagaagacttataaaacggtacaatattataaataatatgtaagaccagcaaagaaaagtataactaaatatacaaaaataaataatgttacttctccatttgattaaatcatagaatgatatctaaggtgcaatttctctattcatcttcatgagttaccaccacacatcactttatacattcaagaaaaaagctcccttattttgatcacaacatccatattctgcgaatcaaattttcgagcaaacaaatgctctgtttctaataaatattgcaaatcctccattttccaaacataaggattcacccgttcccaatcaattgcacgaagtccggcattcaactgctcactacctggataaatatgactccgcctttctgagttccacaatatagattgaagaaatatttcgtcaccacagcaaacatttttaaaacgccttaaaataaaagacttttgagctaatataattgttagcaactcatgcgtaatactaacccaattggaaccctttttaaattcaatttctttaggtcggttataatggaagaaatcctgcaactttaaaaagtttattcgaagagattgtacttgctttttaaaaatacgaggtggaattttataataacgacagaacaaatgatatttaaaaacctttctttcgagatcttttaaattagcctcaccacaagagtaaggcacaaactcataccccttatttttctcgaagaaatgatggatatagtcttgtgactttatcggcaaatcgactcctgacaacaaatgataataatcataaggacctttcatactggctgtctcaagtaacaacagttcagcctttaccacactaatatcaccccatcttacgtcaagacgttgctcaagtacaaaaagacgagcttttgcaagccgaaataaatcttgctctaaaggtccgagcacgactttcttatcaatatgcaaatatatatcattcctcccatcatcaagcatagaaagtagtatcttcaatatttgaaattcattatgggccagaattaaaaaagcatgtctcattacctttgcatcattaaataagttcattatcatgcaaagatacaacagatagaattccaatacaacaatagttagataaattccaaacatatattttgataagtattggaatctatctatctttgtgaaatttaagtcttaaatcattaaattggagttggcacccggttcttaatggagacaaagacaataacgtcattaacctaaacaactattatatagaccaataatatccataattacaatgatagataaacctatatatgtgacttcccccctactgccttctttggaagattttactttcttattaaaagaaatatgggaaagcaaaatgctgacaaataatggcaacttccaccaaaaactagaagaggaattagctaagtatcttaaagttccctatctcagtttgtttacgaacggaactctacctttaataaccgctttacaagcaatgagaattaccggtgaagtgataactactccctttagctttgtagcaacaacacattctctttggtggaatggaatcaaacctgtttttgtagacattgagtcagaaacctgtaatctggatcctagtaaaatagaagcggccattacccccaggactacagctatcatgcctgtacacgtttacgggaagccttgtaaaacgaaagagattcaagaaattgccaataaatatggattaaaagtcatatatgatgccgctcatgcttttggagtagaaataaacggggaaagcattttaaactttggagatatggctactctgagttttcatgcaacgaaagtttacaatactttggaaggtggagcattagtcgttcatgacgagcagactaaaaagcgcatcgactatctaaagaactttggttttgccagtgaaactgaagttgtagcccccggtattaatagtaaagtagatgaggtacgcgctgcatacggattacttaaccttaagcaagtagatcatgcaatcaattcccgtcgcaaagtagccataagatatagagatgaacttcaaggtgttaaagggataacctttttcaatgatataccaggagtacgccacaattattcttatttcccaattttcataaatgctgaagaatatggaatgacgcgtgatgaactttattttaagatgaaagaacataatgtattcggacgccgttatttctatccgctaatcagtacattctcaacatatcgcggattagattctgctaaccctgacaatctgccaatagcaacccaaatgtccaataacgtcatctgcttgccaatgcaccatgctttaagtgaaaatgaagtcgagtatatcctccaaattataaagaaatagtatgatacaattatcagaaataacaaactctatatccccttccttaacaaggcgtctatttaacttggcccaaaaatatgacaatgttatagacttcacattaggagatccggatatacatccacacgataaaataaaagaagctggctgtaaagcgatactggaaggtcgtacaagatactcccctaatgccggattattagaattaagagaaataatatcttccagatacaagttacaatataatatagaatacaacccgacaaatgagattatggttacagttgggggaatggaaggattatatttaaccctgctagccattctaaacagaggggatgaagtcattataccagctccatattggataaactatgtacagatggtatgtatgtgtagtggagagcccattatcacagctcctgtcagcaccaatgacttatcgatatctatagaaaatataaggaaggcaatcactcctaaaacaaaagctattattttaaatacgcccagcaacccttccgggcggataatttctgatgactccatccaacaaatagcacagatagctattgagaatgatttgatagtaataacagatgaggtatacaaaacactactttatgataatgctcatttcaaaagtattgttacatgcgacaagatgaaggaacgcactgttgttatcaatagtttatcaaaagaattctgtatgaccggatggcgtttgggttatgtagctgcaccttcagaattaatatcagtcatgacaatgtttcaagagaacatagctgcttgtgctccattgccgtctcagtatgcagcaatagaagcactaagaaattcggagaaatattcggctggtatgattgaggaattcactctccgccgaaatgttttattggaagaagttgccaaaatcaaaacaataacagtcgatgcgccacaaggaaccttttatgcaatgttaaatataaaatctaccggattaaaatctgaggagttcgcatatgcccttttagagaaagaacaggtagcagtggttcctggaataacttacggtgattgttgcgaggattttatccggattgcttttacattagatatatataaaattaaagaaggaattcaaagacttaagcgatttgtcgaaagtttataagatgaaaaaagttttaatgctaggaggctctttatatcaggtctatgcgattaaagaagctgtaaaaatgggatattatgtaatcacctgcgattacttgccgaataacccaggacatcagtatgcccacgaatattataatgtcagcacaacagataaggaggctgtttacgagttagccaaaagacttcaagtagatggcgtcgttgcatatgcttcagatcccgcagctcctacagctgcttatgtttgtgagaaactaggattgcctaccagcccctatacttctgtagaaattctttctcagaaagacttattcagacgatatctggctgaacataatttcaatgttcccaaatacgtcggatgttcttcatacacggaggctttggaacaaatcaagaatttaacccttcctgttatgataaagcctgtcgattcatcaggaagtaaaggcatcaataaactgactaacgtagatcaactaaaagactttatagaagatgccctctcatattcccgtgaaaaacgcattattattgaggaattcatagagaaggacggatatcagatatcaggagatgccttttccgtagacggaattttaaaattccactgttttggaaacgaatactacagttcttcagttgtcaaagatttcgccccacttggtgaatgctggccttttcaaatgaaacctgaaattataacagaactggaaaaggacatacagcgtctgatttctgaactaaaaatggggacaaccgcatataatgtcgaggctattcttggcaaaaacgggaaattgtatatactggagttaggtgccagaagcggtggcagtttaatacctcagattacggaactggcaacaggagtcaacatggttaaatatgtgataaaagcagctttgggagaagattgctccgaaatagagatgtcacctgcaaggggatattggtctaattatatgttacatagcaagcagaccggacggtttaaagaaatatcatttgatgaaaactttgcaaaaaacaatctggtagattgtgtaacagaactgaaaagtggagataatgttcatgctttccgtgatgctggcgatgcattggggacacttatcctcaaatattcttcgaaagaagaaatgtttaatgttatagaaaacatggaccagtttgtacatattattattgattaaaatatgagcataataatccatacagaacctctagcatataccgaattcagagattttatcatatcctctgcaaactggtttgttccttctctgttacagatgcccaacctggatgaatggatattgaaaatgtaccataatggctctatatactatactatttccggatctaacattatatccttaattgttggctattacaatagagaagagagatttttatatataccctatgtctgtgtaaaccctgaccatcaaggtcatgggatctctaaaaaaacaattaattatatcatagaacatctttctacggatattcaggagatattgctcgaagttagaaaagacaataacaatgcacttcatgcatatcataaaatgggattttatgaggccgaggatagggatgagaagtatttaatgaagaaagaggtacacaaaagttaatattgaatgaaagatatagcaaatactccattagtaagtataatttgtagcacatataatcatggattatatatatcccagtgtctagacggttttctaatgcaaaagacaaattttccatttgaaattctaatccatgatgatgcatccactgataatactcctgatatcattcgcgagtacgagcataatcaacctcaagtcataagacccatatatcagaaagaaaacaaatactcaaagaaagaagatatctttgccaaataccaatgctcacgagtcagaggaaagtatattgcaatatgcgaaggagacgattattggattgacccattaaaacttcagaaacaaatcgattttctagaaaacaatcctgattacggcatgatatatactaccagcaaggtatataaccaaaaggaaggcaaaatagaagaagatattattggacgggaatttaatggttatatagagttattatccggaaattgtattccaactcttactacatgtatacgcagttccttagtcatggaatacttgaaagaagtggaacccaagagcaaaaactggctaatgggagactatcctatgtggctatggatatcatattatcacaaaataaaatttcttccggaaagcactacagtataccgtgtcttagaagagtcagcaagtcattctaatgatatacagaaatatgaaagattcatattatcgaccattgatataactgcattttatatccacaaatttaagactccgttaacagagccatatttacgatccctaagttgcttttattatgatttatacgataagtatatgcatctgggcatgtataaaaaggccagacactattcaaaactcattaatcctagttatgtctccgcacgtatgcgaagaagagtccgccgattccatctcagattcatgcaattaagattagaaaaatggctcaatataaaaggaaaagaaagaaaataaaaaaacatgtatacgtcggatgttatatttgggggaattatagaaaaaaattggtgcagttaccctgatttctttccttttccttgtatgtttaatattattcttgtatattgtcatctggaaatcttttaaacaaattattatttaagattaaagatgtaaattaatacatttgggataaaaagaatgttatttattaagctaattataaatttaatactttttattatgaaaaacaaattatgtgctctttcccttatcctgttactaatttcttgttcagacgagattcaacaatttgatgattttataaagcaaacacaaaatgagaataaagaattaacaactagatcacttgatacagacgatcatgctttaggttttgggtatgatgttacaggtgattatttagacaagtattcaattagaaactctgtaattgatattgcaaaattgcgtgagtttgataagaatagcatcattacaagtaatgaagttagtggaaagaatcaatattactatggttattcttcatatgactatataaaagaaattacgaagaaaactggtgttaatacctctgttagttgtgatagtataccaatagtcaaaggaaatttaagttttacaggttctttctctaaagaaaacttcacaaggcatgaattatctaccaaatattcttatgcaagtgcagatatctgcaaagacgtgagatggctccgattggctgagaatgtagatgtattatcaaatttcttgactgacaaattcaaaagggatatttctaacatgacatcccctgaacagttcgtaaaagattatggaacacatgtattagcagatataacaattgggggtgtcctccgagtcatgtatagttccagcataataaaggaagatgatcaagagaaaaaaacgaaagttataaaagctggattgaaaggagtattagcaaaaatcggattgagtgctgacgtggataaaacagtaatagagaatgtatcgactagtgcggagaacataaaccgaactttacatttggagtacaaaggcggtgacggagttggtggaacatataatttagaaacaggttatcctactattgataaatactcatgggaaaaatcagtaactgctgctaatgctggtttaacaaaaataaactgggataaagcataccctatttatgaatttatttctgatccagtaaagagagaacaggtaaaaaaagcagtgataaaatatataaatgacagtcagttgtcagttttacaattaaatcctatttatgaaatgttcgcaccgacgatggacgatcgattttatgccttttcttgggatgaagttcaaatgcaaataaataaatggaataatgaattttggggatttaagggatatatattagcaaaacctggagtaaatacaatacctatctatgagatgttcgcaccgacgatgaacgatcggttttatgccttttcttggaatgaagttcaatggcaaataaatgattggaaaaatgagaattgggggcttagaggttacatattatcagaaccagaagctaatacacaacctatttatgaaatgtattcgcctcttttaaatgatcgtttttatgtttggtcatgggaagaagttcaaatgcaaataagtaagtgggagaatgagtattggggacatagaggttatgtatttagtaagtagaaataggtactgtcccattttatgcaaatagaaaacttctgaatttaaattggaaattagtaaaaaattataaggttgtgccaacgttttgacacaaccctccttactctctttttttacgagcataatgtttccaataataaattggccagaaataagtaatctttcttatcctcttatacaactttttgtctatttcatctgaaggtaaagagagccatttacgcatccgaactctcatatctttaatctgctttctatcccttagaaatttagcttcttgcataaaatctgaaaagtgataaaaacaagtttgagcaatcattttaataatcgctccgcgctctttctctgaaaacagcctcttctctttcacaaaatctaatctcggatattcggccataaaaaagtgataatgcttattcatatcaagagtatgacagatgcttccatccctctgataataataataatagactttatcaacccatacaactttcgtacacatagctacccatttataaagtactgcgtgatcctcaaaaaaaactccttcgggaaataaaagagaagcaaacagttctttcttaaataactttgtgcatgaagaactactcactttttcacatatgatatcctcaataacctctttaggctgtcgtatgcatgtatgcccagagtcagtataaacagtttctattttcccatcctcatattcataacagaagttgcaataagccatttccgcttgactactactaatggcatccaataagtcctgaaacattgtttcacttatgtaatcatcactatcaataaaaccaacataaggagcagaggctattttaagcccggcatttctagctatagataacccagctatcgaaagatgcagcacctttattcttggatctcttcttgcatattcatcacatagcaccggagaattatcttgagatttattctcaaccaagataatctcaatattttttaaggtctgatttctcacagattctacacatcgttccaaatatggagctgtattatgaaccggaataataacgcttacactatatagagaattcatatcattcatattacgtaccattgactcacatttatctcaaactatattggcttacaaaagtaatgtaaaaaacaaataagatacaacgtttaatcaactaaatgatattccatccaaacaagcataatcctactcaagccctttttggctttcaaagaccttttatagccaattatttgtatatttgcagcaataaattatattttaatataaatggatcagaacttagctattatcattccagcatataaaggagcttacctcaaaagaaccttagactcactagtgcaacagacaaataaaaatttctctgtatatataggtgatgattgcagcccggaaaatctacctgacatcatcaaccaatatatcagtctactaaatattacatataagaaattttccgacaatcgaggaaaaagtgatcttatttcacaatgggaaaggtgcctagacatgatacagaatgaagagtacttcattctcttttcagatgacgatataatggaggcaaattgtgtagaaatgttttatcaagctctcgcatgtaatcatatatatgatgtctaccactacaatatagatattattgatcaacatgaaaatatcacaaaacattgtaatgaatatcctcagattttatctgcatccgaatttatccgtctaatatacacttatcaaatagacgctagaatgcccgaatttatttttaggacatctcattttaacgaaactgggagatttataaagtttgatcttgcatacagatcagacaatgcaacagtattggtatgcgccgaagaaaaaggtattttctcgatagaaaaggctaaagttctttggagggatagtggagtaaatatatcttcaacatataacatctccacacaaaaaagaaaagccatagccacaattgatttttttaattggttagaggcatattataccagcaaaaaccaaacatccccattaactctaaaagaaaggctcctactaactattacggaaatatcctctctatcgcccaattacccccatagtgaattgtataaactgcttcctttaattagacaaatcacccatagtaaaacaatattatttaaaagtaaatgctgtttgttccttttaatacatcaaaaaagaaaaacaagaaaactcatcaaaaagctaattaatatatttctcaaatcctataaataattgcttgagagagagtctatataataatctatttcctctgttttgattttgcaactaattctataacccgttttagcctagataagatcaaattccagttataattattatccacatattgttttccacctttcgccatctgttctctgaatacgggaaaactctctatcttattcaatttacgaataaattgctgttcattcatataataatcaacggcaccatggcttaatttacaatgctcctttagtacagcacatcgcccattcacaagcatcggtatctccagattcagcgtttccagaagtattagagacagactctcatattgagaaggattaactacaagaaaagcatgttgaataatagcaatcttttcttcatcagagacaaatcctgtatatataacttcagcagcatcaggaacttttccaaatataccaccaaccatcaccagctttaatgaagactccttatattgctgcttatagttggaaaaacaagttataagatcattgaccttggctttctccacacgaccgacacaaagcagatatttatcaggaagcctatatttcctctttgtttcttcccaatttgccgcttttattggttcaatacctacacttatgatcccatgagccccgagggctttaccaaacactcgttcacccaacttttgttctgctttcgtattaaatccaacatatgcaaactttgaaaaagcctcagtcaacactccacgaaaagatatctttgtatagtgcattgtaggaatcgcaatacttttctctcccgctaaaatagctgtataataaaatggagtatagtctattgtcaatgcaataaatgccttataaacatccttattttcctttataaactgatgtaactgggacgaataaaagacacatctcctcatagattccagttcttcttgtcgataataagtccaaactggtataaaataggagaacaaccgcaaccctcgaattcgataaagaaacattcttaaacgccgtacaggtttagctctcttcaaatactcagactctgacatatcccgaatcggatcaaccttaaaacggcgtaccattacacgatttatatattcagccccttctgcaatatcattgccccccttcatatagtctttcacacaagtagtaagcacttctacatcataatcatctaccaatctttctgccagcatacgacaatgatattctgctccaccattaatatctgccccataccggacaactacgaaagctatcttatcttttcccattttcttttataaaattaatatctgacttcaatcttcccattataagagaccaattataattactctccacataagatgcacctttttctcccatctcctctctcaaatcttccgattgttcaatccgtcgaagcgcttgattaaacccacgcttattcatataataaaaagaagcaaaatcactttttaaacaatgttctttcaataccttacaatgtccgtttacaagcattggtttcttttggctcatagcctctaaaagtattaaagaaaggctttcataacgagaaggattcactacaatttcggcatgctgtagaattgacattttctcttcatcactgacaaaacctgtatatataatatcaggatgctcaaatcgctccatagccagtcctcccaccaatactaatcttaatgttgaatctgaatatttcttcttataattcacaaaataggtaagtaaacgatgaatctttttaggagtaatacggccaatatataacaaatatctctctggtaattgaaacttttcttttgtcagcgcccaatctgcggataaagactcctctattcctacactcaatattccatgagctcccagagccttgcccaagatattttcagcaagtctctgttcctctccagtattaaaaccaacataagctatctttgaaaaagcagaggttaatactgaacggaaagaaatacccatattatgcattgtaggaatagctatcgtttttctacctgcatacaatgcagtgtaataaaaggtgacataatcagaagacattgctataaatgctttatattcatctatatgatcacgaatataatcattcaatgtggacgaatagaatttatcactcttcatcgcctgcacttcatcatcattcttgtaggtccatataggaatcaaataagacaagtatttcaagattcctaatttaaaaaggaactggcgtagttttcttgctggtttagccttctttgcgaaatagcgttccttttcacgctgaacaggattcgtcctaaaacgacgaatcaccactccattccattcttcctcaccttccggatatatattttcgcctgtcgcaacatctctgacacaggtagtaagtacttccacctcataatcagatactaaccgttctgctaacatctgacaatgatattcagccccgccatttatatttttgccatatctgacaacaacaaaagcaactttctctttcttcatagcttcccttaatacaacattttacttatgagagcatctgaatcacatttttcatccgtcctataatcatctcccaattataattctcctgaacatagtgacgccctttctctcccatctgttgacgtaatgtttctgagttctcaaggttatgtaattttcgtataaaatctctacgattcatataatacaaagctgcataattgctcttttcacaatgttctctcaacacattacacctgccattgaccaacatcgccttaccttcgctcatcgtttcaagtaaaataagtgataaactttcatatctggaagggttcacaattactttagcattcaactgaatcgctactttctccgcatcatcaacaaaacctgtgtaaattatatccggatgttcgactgtctttccaaaaatgcctccgactaaaactagctttaatcgagaacctgtatatttctttttatagcttaaaaagtaatcaactatattattcaactttatagcatcaattctccctacatacaatagataatcttccggcaaattatattttacctttgttcgctcccaatcagcagcttttgtcttctctatacctacacttataatgccgtgagcagccaaaggctttccaactatattctctaccaatttctgttctgcttctatattaaatccaatataggcaacctcagagaaaacagaagtaataatagaacgaaaggatgaaccgttattatgcatagtaggaatcagaatcgtcttctccggtgcatatagtgcagtataataagtatgagggaaaaaggaaagtgggatgaatgctctataagaagctttattctctcttataaaagcatacattgaagatgaataaaaaaactgactattcaaggcctttatttcttcttgttctttataatgccaaatcggtttcacataagacaaaggcttcaaaagacgacatctgtacaagaagtgcctccacttctttgccggagccgcctgcctgacatagctcttatgtaagtccggttcaacaggatctgaatagaatcgacgtaccaaaactccattcaggatttcttctccttcaggatattcattatcaccggtaacataattcttgacacacgtagtcaatacttcaacatcataatcgttaaccagcctttcggccagcatacgacaatgatattcagcacctccgtttatatcttttccataacgaactactataaaagctatcttttccttagtcattctagtcaatcaacaatttgtgctttctcttaaatatagcacgataaccacgatatagcatcctatagaaaccgaagtgtttacacataaaatatcgtttgattgacatactcgggcctagttgccaaggagtaatatgacgatattcacgcattttcaacatcgtttcatctatgatatcctcaaaggccggtgacggagggcacaacaaagtatggttaatcaaatgaatccctctcttaagtacgccaacggaagattcacctccaagttccgcattttgaataaacttatcctgttcataaagactcaggaagtaatgatattcctttaccggatcataaccaccacgagtaatgctttcattcttatgaatcatataatggtatttagagacacaactcaataccactttctgagagctataaaatactttatataatacagccacgtcctcataaacccgtccgacagggaatgaaaggcggtcaaacaatttacgtttaaagagcttcgcccataaatagttctttaccaagtcattctttaccaaagcacgtataatctcctttctggagaaaacatacaacttacccgtgttgttgattattttagaaggccttccctcctgctcaagaagataagtacaagcagaaacatctgcatcatgctcttgcatcaaagcgtaaagatactgatacatatcatgatcaatccagtcatcactgtcaacaaagcccaagagctctcccgtagctgcagccaaaccagcattacgggcagcactcaccccactatgaggcaaatgaatagtcttaatgcgctgatccatacgcgcatactcatcgcagataccggaagagccgtcgtcagaaccatcatcaactaagataatctcaaggttcttataggtctgctccagtatagattgcagacaagtcttcaaatagtcctttacattataaacaggcactataagactaatcaatggtccagagatattagtattcatattattctacttgtcaactttttatttttactgcagccccttctatatagaatgctatataacaaggaatactgcaaaactaccctcgattttaaataaatttcacacttgtctgtgattcgataatacaatctaaacactctcaaatcaaacaattacctcttatttgccatttatacagtataattcgtctagtttccaaagttcattcaaagatttccactgtttatcattcaggttagttttcccattatttttcttttgtaagctattattctgcgtttgaggcagctctatcggccggggatagaattcaccccctcctgtcaccttgacccgcctctttaattcattcgctttcaaccataaatcatccgcagacggacaatgttcactgattattttccagtcaaacaactcctctccataccaatggggaggataataaatcccgccacatccgattgccacattctgcaaagaactattcaccggcatcgtaaacactttcgtccactttctatataccgaaaaagaatttccatccatatgaatcttccggataacgtttccgcaaaccgtatccggatactgatacgataaggaaagcaaacgctcaaccgtattccggggataaatcagatcatcatccactgttatcactttactatccggatattcacggaaaacataatgatacttcttatgtgaacggaaattctcagacacaaatctgaattctattcctttagccatcaacattttaagttcttctggcagatcattcaaccgtccggggaactcctgttccgacaaccatacaattatcttttcgggcggacaagtctgccacagaatcgatttcaacatcagatgaagctgggaaatacggggaggaaatgtcgtcaacgagacaatgactcccgaatggttcgataatgccggagcatcagtgtcctgctgataagcacgcaccactttatcatgatactttgctcttctccacctgcaagacaaagaatagatatgtcggtaaaatcctcctttttccttataggaagtcagcctctcttcttcccgtatatagcgatcataataactgttcaccttcacagactgacctctcagttcatcctttacaatgcccagagaagcccattgaacctttgctccacgagtatgctttcgtatattccggttcttctgaatagagtctttcgtcttataccctcttgcatgatccaaatggaggcatacggtagagtaacgtatctgcataccatgaattccatagttctccagacgttctccaaattcacggtcttgtccaccgtactgcatacgctcgtcaaaaccattcactgccagaatatcgcttagccaaccagaagcgttatgcccgttccagcttgctttggtaggagtaaatgtatttaatgcccaccttttaaatcctgtagcagtcagtttattatttttaaaagaggcaggcatcccttttcctctcatccattgcagatcaaaacatctgccggataatatatcgtcctttgtaatatctttcgacaaatccatactcaacttatgatatccgccggacaggaaacgtcctttacggcgaagacacaggtgagttgagacgaagtctttacgtggaatacaatcgccatcactgaaaagcaggtaatctgcttgcgcagccagtatgcctttattcagaatatcgcacttacggaatcctttatcttcgtgccatacatgcttcacctgaaaggataattgcggagttatcctctgcaacatatcataagtttctttccgcgaaccatcatcggcaataatcaattcaaagttcttagtatcctgggcttcatatccccacaacaccttctccagccattcaagctggttgcaggttgacagtacgaccgacatctgcaaagaagtagtcttccgactaaaacggataatagaataattgcactccatctgttccccagcccaataaagttctctcgaaatctccctccatccggctaagtccacacaatcagtgccatcaatgtcttcctccttatgcaaacgaaccagacataatgcgtcctcatcctgatcttctttcaagtcagcatgatgagccagcaagtagtcccgtactttttcatccgaacaaacaacattattttcaaaagctactatcattaattaccctcctttagccattaaatatccaactgaaaccagacctgatgtctgcgacgatatctgttccagaatttctttctgtaatgcagaatcaaacgcacacattcttcttcatccatccctctcgaacgggcatactcttttcccaacaagatgaagaagggtgtctgcccccataaacgggcaaaattcgcacaacctttcttaatatccacttcgccaaaatgcattctgttaatatctaccagtgagaaatgatattcctctcctatcttgtcatacaggatgtttcccggcgaatagtccagatgcagaattccggcttcatgcagacgcgctgtaaattccgcaaaagcggtcactacatcttcgcagctttttatatccgcattgccaaactggcaaaaattatatcgatagggagattgtatgctcataaaatatgaatgaccaatcaaacccattttagtctcttctatataggcaataggacatggggtttcaaaccctttctccaacagtttctccggataaacaaaagcccgtttccctttcgaagggcgaaagaaagcataagcgatccggtttatcagcggaggtatcgtataccgtttcacgttaatatccaatccatccaccgtgatcatctttatcaaatttcgcccggaatgaattaccgttcctattgtctcaaaatctttcggaatacgttctacatattctctcagatattcgtatttggggttaatcattattttcatcttacgaaaaaacaagaatggtcatacttctcttcatctctcaactcttttgcccggtcatcttaaaatatttatccaacacaagcagtgatatcaaattttctcttctcttatctttaaattgggacacatattcatgggcatgattgatgatctccaatgattcgtctacatgctctatatagtaattcaaccgttcctctagatcagagaaatccggttttatttcaatataatgataattgggaataagcgtgccttccataaaccatgtctcacaggtaggccggggcatcactgctattgaatttgatgacatcacccatttcaggttgctggccacatcgattccttcaagagccattatgaatttataatccaaatgctcattaatcgttttcttctccgtacgccactctgccggatcagtcgtatttttgctaacatctcccagatcgcacatcggatgatgaaaatacatttccataaaaagctttctggaaggttttccttttacctttccacgaaagattaccatatttttcttctcagtaaaagccttcttgtcgtccacaaatataaaatgacgaaccttatccagtttcatcacaatcgaattcacgttatcatctgtcagcggacgacttttcacaatagagggatagtcgggaacaaatgtcacatcaccgggacaaaagccccactgaaactgatcagaaaaccagcgggtatattgataagtatcaaagaaatacactttttgtttgctcatcttgtgctctgaaagatgcggagcagaagaaggtaattgcaccgttccggaaagtttgttataatagtcaacgcgacgttctatataatccttgtccttccggcgggatagtgaagacaactttccttgtaaccgtagccggaaaatgcctttcggaatgaccagtctgagagcatttaccgaatagtaaatgaacttaggattcttcccgctacgcaacttatataaaagtttattcttcattcttgttccatatctcaggagtacctggctcctaattgattattccttcaatcttcgctatcacctgttcgggttttatttctctcaggcaggcataatcgccccgccagcatggtttctgtccgtatacggagcagggacggcatgacaggtcaagctgtaccgtattgaccggcaactgtttccatcccataaacccggcatatggatgagtagctccccaaacagagatcaccggaatgttgaccagcgaagccagatgcatattcgccgaatccatcgagagcatcacatccagatgactcattagattcagttcggtacgcatattcaacttaccaatcatagaaacgacggtaggatatttcgccacccagccatcgaatacttcctgttcactcttgccacctccgaaaaggaaaaccttcaccttcggatcggtggcaaaatgggctactacctgctcctgcaattcaatagggtatatcttacccatgtgcttggcaaaaggagctataccaatccatttcaaattatcttttgcgcctgtgacaggttctatctctgcaaagtttcctttttcatctccataaatcgaagaaaaattcaacaatacaggaaaacccagtttctccagcacatcggcataacgacggaaagaacttttctggttctccaatactttatgccggcggcggactaatttttcttttcccactctacctttatagatagatgccacaggtatattagccagccggaacctcagacacagatatttcgtacgaagcacatgatgaaaatctgccacatagtcgaaactctttgctttcagttccgaataaagggtgttcaacccccataatcctttatgtttacccgtcaggtcagcaccgataaaactcacatttgcaggaagtccctgaaaaagcggttgccacacagcacggctcaacacagtaatttcaagttgaggatattgtactgccagcgaatgtactaccggtatcgtcatggctacatcgccaagagccgagaaacggataatgagaatacgcgccattcgttatttttttgcataaagcaccggattcagcgccgggtcattatacatcttcatctgtttatatactttcatatacttcttccctgcttcgatgtcagccagcagctgatcgatagccgaagaaaggtctttctgttgttccagcagaatatccagttttacctggcattgtgcacgatgttcttccgtcgtatccgtacgctccacttcttgctgcatgtggtaaattttcaaagcaagaatagagagacggtctactgcccaggcaggactttccgtattgatggtagcatctgccagcggctttacatccttatatcgatcaagaaaatagctatcgatcaactccaccagatccgtacggtcctgattggatttatcgattcttctctttaaagctacggctgccaccggatcaatatgcgggtcacggatgatatcttcgaaatgccattgtacggcatcaatccagtttttcagatacaaataatactctatcgacttcaactcgtaaggattgttcatcggcgcatctacgctgtccgtcacatggtaatctgtcgtcgatttccaaaaaatatcattgcaaaggttactaaatgtcataatcttaactagctaatagatgtataataggacaaagctatgtaatatttttcagacaagcaaccgtttcttacttttttatttcttacctttgtctgagtaaaaaaggaattgtatatgaaaattattatagatgataagataccttatataaaagaggcagcagagaaaattgccgaagaggtaatctacgcaccgggaaaggattttacacgggaactgatacaggatgcggacgcactcatcatccggacccgcactcactgcaaccgcgaattgctggaaggcagcaaagtaaaatttatcgccacagcaaccatcggatttgaccatatcgacaccgaatactgcaagcaggcgggtatcgagtgggcaaatgccccgggatgcaattccgcctcggtggctcagtatatacaatcctctcttctgatctggaaatctcttcggaataaaaagccgggcgaactgacgatcggcattatcggtgtaggtaatgtaggaagcaaggtggccaaagtcgcacaggatttcggtatgcgtgtactactgaacgacttgccaagagaagagaaagaaggaaacatcgccttcacctcactagagaaaatagccgaagaatgtgatatcatcacctttcacgtacctttatataaggaagggaaatataaaacataccatctggcagacgggaatttcttccggtctctccaacggaggcctgttgtcatcaacacttcaagaggagaagtgatcgaaacaaacgccctgctggaagccatcaacaacggtacaatctcggacgcagtaatcgacgtatgggaacatgaaccggaaatcaaccgtgaattattagaaaaggtactgataggcaccccgcatatcgccggatactccgccgacggaaaagcaaatgccacccgaatgtcgctggactccatctgccgtttcttccacctaggcgcaacttatgaaatcaccccgcccgccccatcttcgtctcttatcgaagcaaaagaccgtgaagaagctctgctgaaaatgtacaatcccatcgaagacagcaaccgattaaaatcccatccggaactattcgaaaccttacggggagattatccgttgaggagagaagagaaggcgtataatataataggtattaagtaataagtattaggtattaaccgtagttgcttaaacttccattcggcaaaagtccgcatggttaatacttaatacctaatacttaatacttattgtttcttctataacatgtgggaaatgctcatactccaaagcgtgtactttttcagccacctcttcgggtgagtcattgggaagtacggggcaggtggcttggaagatgatgtttccttcgtcgtagtgctcattaatataatgtatagtaatgccagtttctttttcgcccgcagctactacggcttggtgaactttgtcgccatacataccttttccgccgaacttgggcaggagagcaggatgtatatttatgattttatcgggataagcatgcaaaagcaaatccggcacgcggacaaggaaacctgccagcacgataaagtcaatgcgatattcctgcaaaatagccagaatttcatctccggctgtccagtcctccttcgggaacacgttacagggcactttcaaacgatacgcacgttccaaaacgtaggcatcacttttattagaaagtactaacgacacctcaacggagtcgctcttctggaaataccggatgagattctcggcatttgagccggaaccggaagcgaaaatggcgatgtttttcttcattatactcgaattcaatgcacaaaacagtgaaaaaatgtgcaaaagactgcatttatttagtcaaatatttgcgcaaaacgataaatattcattcctttgcaccgcaaatttaaagaaataaaactaattattaattaaaaacttaaagttatgtctgaaattgcatcaagagtaaaagcgattatcgttgataaattaggcgtagaagaatcagaagttactaacgaagcaagcttcactaacgatctgggagcagattctcttgacactgtagaacttatcatggaattcgaaaaagaattcggtatctctattcctgatgaccaagcagaaaagattggtactgtaggtgatgctgtatcttatatcgaagaacacgctaagtaattatccgatttcatcaatatggaattaaaaagagtggtagtaacaggccttggcgccattactcctgttggcaatgatgtacccgaattctgggaaaatctagtgaacggggttagtggagcagggcctattactcattttgatgcgtcgcaattcaagacccagtttgcatgcgaagtgaaaaacttcgatgtaactaaatatatcgaccgtaaagaggcaagaaagatggacttatacactcagtatgctgtcgctgttgccaaagaagcggtatcggactccggtcttgacgtcgaaaaagaagatttgaacagaatcggtgttatttttggcgccggtatcggtggtatacatacattcgaggaagaagtaggcaactactacactcatcaggaaataggtcccaagttcaatccgttcttcatcccgaagatgatctcggatattgctgccggacagatttctatcatgtatggcttccatggtcctaactacgcgacttgttcagcatgtgctacttctaccaatgccattgcggatgccttcaacctgattcgtctgggtaaagcaaacgtaatcgtatccggtggttcggaagcagccatcttccctgcaggcgtaggcggtttcaacgctatgcatgctctgtcaacacgcaacgatgagccgagtaaggcttcacgtccattcagcgcaagccgtgacggcttcatcatgggcgaaggtggcggttgcctgatcctggaagaactggaacacgctaaggcccgtggtgcgaaaatctatgcagaagttgccggtgtaggtatgtctgcagatgctcatcacctgacagcttcccatccggaaggtcttggtgccaaactggtaatgctgaacgctctggaagatgcagaaatggatccgaaagaagtagattacatcaacgttcacggaacatctactccggtaggtgatatttctgaagcgaaagcaattaaggaagtattcggtgatcacgcatacgaactgaacatcagttctacaaaatcaatgactggtcacttgctgggagctgccggcgcggtagaatctatcgcaagcatccttgccatcaagaacggcattgttcctccgactatcaaccacgaagaaggtgacaacgacgagaacattgactacgaccttaatttcacgttcaacaaagctcagaaacgtgaggttaatgttgccctgtccaatacatttggattcggtggtcacaatgcgtgcgttatcttcaagaaatacgctgagtaaaatcgtgttacgtaaccaaatagataagataagactcctgttccgcaaagacagagagtcttatctttgtttttaccggatactcggattttatccgcacaatatccagatctacgaacaagcgctcctgcataagtcatctgccgtccgctccgagaagggacgtccgctgaacaacgagcgactggagtttttgggtgacgccatcctcgacgccatcgtaggagatattgtctataaacgtttcgaaggaaaacgggaaggtttcctgacaaacacacgttccaagatcgtacaacgggagactttgaacaagttagccgtggagatcggtctggacaaacttatcaaatattctacccgctcctcttcccacaacagttatatgtacgggaatgctttcgaagcatttatcggagccatttatctggatcaggggtatgaacgttgcaagcagtttatggagcagcgaatcatcaaccgttatattgatctggacaaaatctcccgcaaagaggtcaacttcaagtccaagcttatcgaatggagccagaagaacaagatggaggtttcctttgagttgatcgagcagttcctcgaccatgacagtaatcccgttttccagacagaggttcgcatcgaagggcttcctgccggaaccggtacgggctattccaagaaagaatctcagcagaatgccgcgcaaatggctatcaagaaggtgaaagaccagacattcatggatacagtcaatgaagcgaagtcgcagcattcgaagccgtcagaagtggaaacagagtcggtcgaacctgaattggctgagtcggaaaccatggaaccggatactttggagaccgaagcactggaagcggaaacgactgcagacaaagtcgaaacgactgttaatgaggccgaagcaacagaaactgagaaggaatgacgactccaactaccatcctaacgacaaaagagtaaattataagttaaccgaaacaaatccccatgcggcggccctgaatcactaaatcgtgatcttcagttaccaacttcaatttaccggcaacttcttcaagaggaatagacgaaatgtcatctccttttaaagcaatcatacgcccgaattgcccgttggcaatcaattctgtcgcgtgtcctcccatacgggtagacagattacggtcgaaaggagtaggcgaaccgccacgctgaatatatcccaatacagtttcacgtgtttcgatgcccgtttcatattctatttcctgtgcgatgtattccgcggcacgtttccgaccatccgtcaagatgccttctgccaccactacgatggaatagggtttgccttttttcagcctttcgaggattgtatttcctatattcttgatgttgtaagggatttcggggacaagaatgacgtcgccgccacccgccatgcccgaatacagggcaatccaaccggctttatgccccatcacttcaataaccatcactcttttgtgcgagctggcggtagaatgcaagcggtcgatggcatccgtagcgatgctcacggcggagtcaaatccaaaggaaatatccgttccccaaatatcattatcaatggttttgggaactgatacgatgttgacgcccattgcggcaaatttagcggcagttttctgcgttccgtttcctccgatacagacgacacaatccagtcccatttcctgaatattctgaagaatcagtgccggcttatcgacatccgagacgacacctccttttttaaagggtttctcgcgcgaagtacccagcattgtacccccttggttcaacaatccggataaggatttatcagtaaaggattctatgtcttttgtcagcaaaccttgaaaaccactatgaattcctattacttccatcccatagtgattgatggcagttttgcacacgccacgaatagtggcatttataccggggcagtctcctccggaagtcaggattccaattctcattgtcgttttttttagtcagaaactcgggattcaagaaaagtcgccaaattttaacgattatttccgtcgtaaagatagaaaaaaaagataaataaggttacttttgcacgactaaacattattatgttaaagcagaaatgaatattacaaagattattagtaagactttcgattcccgtttaaaacaaatagacctttatgctagtcaggctagtgagatacagcaccgtgtgctgagtcgcttagtgaaccaagctgcacagacagagtggggaaaaaagtacgactacgcctccatccgtagctatgaggatttcagaaaccgccttccaatacagacttatgaggaaataaagccttatgtagaacgcttgcgggcgggggaacagaatctgctttggccatcggaaatacgctggtttgccaaatcatccggaacgaccaatgataaaagcaaattcctgcctgtcagcaaagaagctctggaagacattcactatagaggcggtaaagatgctgcggcactctacttccgcatcaatccggacagtcactttttctcgggaaaagggttaattctgggaggcagccatagtccgaacctcaactccaaccatagtttggtgggagacttgtcggcgattctgattcagaacgtcaatccgttaatcaatttcattcgtgtgccgagcaagaaaatcgctttgatgagcgaatgggaaaccaaaatagaagcaatagccaacagtactattccggtcaatgtgaccagtttgtccggtgtaccctcatggatgctggtacttatcaagcgtattctcgaaaagaccggcaagcaaacactggaggaagtttggccgaatctggaagtattcttccacggcggggtggctttcaccccttatcgtgagcagtacaagcaggtgattcactcaaagaagatgcattatgtagagacctacaacgcttccgaagggtactttggtacgcagaacgatctttcagaccctgccatgttgctgatgatcgactacggtattttctacgagttcattccattggaagaagttgataaggaaaatccacgcgcttactgcctcgaagaggtggaacttaacaagaattacgcaatggtgatttctacgtcctgcggattgtggcgatacatgatcggtgatacggtgaagtttaccagcaagaacccatataagttcgtcatcacaggacgtacgaagcatttcatcaatgcttttggagaagaactgattgtagataatgccgaaaaaggcttagctaaggcttgtgccgagacaggtgcacaggtgagcgaatactctgcagcaccggtatttatggacgaacacgccaaatgccgtcatcaatggctgatagaatttgccaagatgccggattccgtagagaaatttgccgcaatacttgatgctacattgaaagaagtaaattcagactatgaggcgaagcgttggaaagatattgctctgcaaccactggaagtcatcgttgcgcgtccgggattgttccatgactggctggcaaggaagggaaaattaggtggacagcacaaagtgcccagattaagcaatacacgcgaatatatagagtcaatgctggtgctgaacaacgaataaagttatccgaacaaattaaatcattatatgacagaaagtatcctacagtgtacataatatgcactgtgggacttttttgtattcccagcttgcaactggtatctacaacgctataagcaaaaaataaagaataagatgagtcgattctgttgcagatggcagatgatttttactttttcaaactttataggagactgaagcaatgattattctacaatgattccaccgcctagcaacaaaccatctttatagaaggcagcagcctgcccggatgcgattgccgtcaacggttcgtgaagttgtacatgcaggaaattatccggtgtaactgtcacagtacaatgattttcctgtttccgatagcgaatcttcacaatgatatccgcatgccctaacaaacgttcccgattaacaatattccaatctttaagtaacatctccgttttctccaaagcctgtagggaagcgagtactacttcattcttttccgggcgaatttccttcacaaagacggcacgattcaaatgaatgcccaagccacgccgttgtccgacggtataaaaaggataaccctcgtgccaggctataaaatctcccttttcatcgacaaatcgtccacgtctgacctccgctgaccaagtctgacctgcactgacctggggctgacctacgctgacctgcggctgacaattgctgacctgtggctgacaattgctgaccaaccactttttcagaaagcttcgataatccatcgggcaaaagcaaacgcccagactgtcccttttcaccgccactttctgaaatccccgttcagcagcaaaggcacgtgcttccactttggtaatatctcccatcggaagcaacattctccgaagaatatcctgtttgagtccccataagaaaaaggtctgatccttgtccgaatcggcagcgtaagttatataataggtatcatccacctttactttccggacataatgccctgtagcaatataaaaaatccccatttcatcggcaattttggaaagaaggggccatttcagatagttattgcacaatgtgcagggcacaggagtatgccccaccatatattcctgcacaaaatactcgatgatctgttcgcggaatatctcgcgggcatcatacgtgatatgacggattcccaaacgctctgccagatggcgggcatcttccagatattcggtcgagtcgttcaactcatagaaacggaaagtaactccggtcacctcatatccggcttccagcaatcgcatggcagctacggaactgtccgtaccgccgctcattcctaacaatactcgtttgttttcttccatcatgctgcaaaattaaggattttcccgtatctttgtttgttaaagcctaaagagaatggaagagaaagcaaataccggacaagttatcatcgttttaaccgaacatctgacgttcggcacactgctgattccttatatggcagagaaatctgacgacggtacataccaactcattgaacaggcttttcacgcttcccccgaagcaatcagccgaatgaacgaagccgagcaacaagctatcgacatcgcctcacattacacagagaaatatctgatgggaatctattcgcgtgagaaaacagtatcccgttttctgcgcaaattatccgaagatccggaacgggtaaagaacaatatccgcccattcatcgagaaaaaaatgcaggagatgctgacattgatacgccatcataatcttcctctgtatcagaaacaggtcggaagcaaactgctatatgcgcatcacgcctatcatgtgcatcctcatgacgtggaaatccgttttacgtttcttgccgatgagaccaatttccgctaccagctgcaatgctattatgacgggcagccgctctcattaagtgaacagaagcctgttatcgtgctgacctcctcaccgtctgccctcttactgggaatggagctgtacttctttccgcatattgagagcgtacgcattctgccctttaccaagaaaaagaaaatcagcgtccctgcttcccaaatcgagaaatacatcgataacatcgtcattccaatagcacgctatcatgaaatcacgactcagggactgaatatcattgaagagacgtatgcctgcgaagctgtcctgtctcttgaagataccatttacgacgaacagatgttgcggcttagcttccgttatggtgaccagtcatttactcccgacaccgtgaccgaaatgaagaagatcatttaccggaacgatttcggcgagatattctttttccgtcgggatagcgatgccgaagaagagaagctccggatgttaacagattccggcttgcaacgagtcagcgacgttcatttcaagctgtcgcccgatgcacccgaaaagacaattaccgaatggatcagtacatatcggaagatgctccaacagtcttttctgctgacaggaaacatggggaatactccttactgtctggacgaaatccgcatcgaacagagttgtgatgatgagcccgactggtttgagctacatatcacggtagtcatcggcaatctgcgtatccctttctcacgcttccgcaagcacatccttgaagagaaaagagaatttctgttaccggacggacgcatgattcttttaccggaagaatggttcagcaaatatggaaacctgttggaactgggcacccagacggagacggggattcgtctgaaaccgacctttgtcggtgccgtacaatcggctttagaagagaacggacctaaagacctgcctttcaagagagagatacgtaatgttcctgttccccaaggactgaaagcggaactacgaccctatcagcagaagggattctcatggatggtgcagctgaacaagcaaggattcggcggctgcctggcagatgatatgggacttggaaagacacttcagacgctgacgctggtgcaatatatatacaaaccgctttctcccgatgcggtcactgctcctacaaagcccgtatttacagaaagcacagcttccgacaatcagccggacaaagaatgtactgccggtaatcctcccgccaaagagcagatagcagatgccgaaggacagttctctttattttcgttctcctccgaagatgaactactgccggatgcacgggaaatcagaaagaaaaacagaccgaaagaagatggtcacagacaggaacacggaaagaactcctgtaaacctgccactctgatcgttgtccccacttccctgctccacaactggcgaagagaggctaaacgcttcacgactcttgcgatagcggaatataacagcaacaccgcatttcccaaaggacatccggagaagttcttcaatcatttccatctgatattcacgacttatgggatgatgagaaataacattgatattctccgctcctacacattcgaatacatcgtacttgatgaaagtcagaatatcaagaacaatgattcccttactttccgttcggtcatccagttgcagggcaagcatcggattgcacttaccggcacgcctatcgagaactctctcaaagatttgtgggcacagttccgttttctgcaaccggacctgctaggagaagaaaacgcttttcataagcagtttatcattccgatccggcaaggaaacgtccgtatggagaaaaggctgcaacagatcatcgctccgtttatccttcgcagaagcaaaagcgaggtagcgccggaacttcccccgcttaccgaagaaacgatctattgcgccatgtccgaaaagcagagtgagagctacgaacaggagaaaaacagcctccgcaacatattactccagcaacccgaaaacagagacagataccatatgttcagcatcctgaacggtatcctgcgtctccgtcaactggcttgccatccgcagcttatctttcccgacttcgacgggatatcgggaaaaacggaacaaatcatcgatacctttgacacactaagaagtgaaggacataaggtacttattttttcttcctttgtccggcatctggagatacttgccgaggtattccgccaacggggctggaagtatgctctgctgaccggttccaccaacaaccgaccttccgaaatcgcccatttcaccgagcaaaaggatgtgcaggcattccttatttctttgaaagcaggaggagtcggtcttaaccttacacaagccgattatgtatttatcattgatccctggtggaatcctgctgccgagtcacaagccatcgcccgtgcacatcgtatcggtcaggataaacaggttatcgcctatcgttttattactcagaacagtatcgaagaaaagattctccaactacaggaggacaagaggaggctggcagaaacatttattacggatagtgaggcactgcctgcactgagcaatgagcagtgggcggatttactgcaataacaatcaaacatctcactattgcaccataaaagtgcataatctaagcatattttaattaccacgcactttgtagtcatccattttctcctatctttgcaacccaaaacaatgcgacatgaaatacaaactcatagtgctcgacctcgacggcacactcaccaattctaaaaaggaaatctcttcccgcaaccgggaaacgctgatacgcatacaagaacaaggtatccgtctggtacttgcatcagggcgaccgacttacggcatcgtaccgctcgccaacgagttacgcatgaatgagttcggcggatttatcctgtcctataacggtggagagatcatcaactgggaaaccaaagaaatgatgtacgagaatgtactgcccaatgaagtcgttccggtactctacgaatgtgcccgcaccaatcatctaagcatactgacttacgacggagcagaaatagtgaccgaaaactcacaagatccgtacgtacaaaaagaagccttcctcaataaaatggcgatacgggaaacaaacgacttcctgactgacatcaccctgccggtagccaagtgcctcatcgtcggggatgccggcaagctgattcctgtagaatccgagctttgcatccgcctgcaaggaaagatcaatgtcttccgttcggaaccttatttcctggagttggttccgcaaggtatcgacaaggctttatccctcagcgtactgttggaaaatataggaatgacacgcgaggaagtgatagctataggcgatggctacaatgacctgtcgatgatcaaattcgctggtatgggcatagcgatgggcaacgcgcaggagcctgtgaagaaggctgccgactacattacactgactaatgacgaagatggggttgcggaagcgatagagagaatcttcaacgtcccataaggcattcttccttcagcagatcagacaaaatcccttgcaagttaagttgaaatcaattatttattctaactttgcacttccaatagaacaaatataaaatgttatggaacatcaacttaccatttacaacacgttagatagaaagaaagaattgttcgtaccgcttcacgcaccgcatgtaggcatgtatgtatgcggaccgacagtatacggtgatgctcacttgggacatgcccgtcccgccatcacatttgacgtactcttccgttatctgactcatttaggatataaagtacgctatgtacgcaatattaccgatgtcggtcatctagaacacgatgccgacgaaggagaagataagattgccaagaaagcccgtctcgaagaattggagcctatggaagtcgttcagtattacctgaaccgctatcataaggcaatggaagcactgaatgtactttctcccagcatcgagccgcacgcttcgggtcacattatcgaacaaatccagctcgtacagaagattctggacgccggatacgcttacgaaagcgaaggttccgtctactttgacgtagctaaatataataaggactatcattacggcaaactctccggccgcaacctcgacgacgtactgaataccacccgcgacctcgacggacaaagcgaaaaacgtaatcccgccgacttcgccctctggaaaaaagcgcagccggaacacattatgcgctggccttcgccatggagcgacggtttccccggatggcatgccgaatgtaccgccatgggacgcaagtatctgggcgagcacttcgatattcacggaggaggaatggacctgatcttcccgcatcatgaatgtgagatcgcacagtcggtagcttcgcaaggcgatgacatggttcactactggatgcacaacaacatgattaccatcaacggtacgaagatgggtaaatcactcggcaacttcatcacgctggatgaattcttcaacggtactcacaagttgctggcacaagcctacactccgatgaccatccgtttcttcatcctgcaagctcactatcgcagcactgtagacttcagtaacgaagcattgcaagcttcggaaaaagggctgcaacgtttgatagaagcaatcgaaggactcgacaagatcactccggccgcaacaacttcggaaggtatcaacgtgaaagagctgcgtgctaaatgctacgaagctatgaatgacgacttgaatactcctattgtcatcgcacagcttttcgaaggtgcccgcatcatcaataatatcaacgcaggaaatgcaacgatctccgcagaagatctgaaagacctgaaagaaactttccacctgttctgcttcgacatcatggggctgaaagaagagaaaggttcttccgacggtcgcgaagccgcttatggcaaagtcgttgatatgcttcttgaacaacgcatgaaagcaaaagccaacaaagactgggctacttccgacgaaatccgtaatacattgactgcactcggatttgaagtgaaagatacaaaagatggtttcgaatggagattaaacaagtaattcaagttctccctagcaaactgtctcattaaccgcatataaaactgagggtcgattcttcgctgaaccgaccctctttctttcatagaaacacaaacatcaatacctatttaaattctctcttcatttattttcaagaatcatttccaccggttgtccatgctgacaagttacatccagtatcgtatgggcacctttatattcaagctttacattcgccggtgtctccaagaaactccagcgtcctttcagctctattattttacgaatagggcggctcggttcttttgtcgtatacgtcttttccgcaatattcaagtttgggtcacagacgctgagacgaatcgccttttttccctctgccgcatacatgaccatcgtttccgcaggaatggaagcaaccaccagcttatcgtcagcagaccggtaatcttcaaaaacagcatatccggttatacccgttttcctgtcatagacaatatgcgcagtctgatcacgttgccatacttcgtatgcaggcgttttcttcagttcatccaaatccgaagctgaaggctgaatcagtaccatatattcataagtagcattcttcggggcgttgccatgttcaatccaggcagaagaaaacgttcctgtagtcttttcgcgggttttctcatgacgcgactcctgttcggctatctgtgaacgaagggttccgtcaactacatgataataattatcatagccgtcgtgcaaccaatagttatccttacctgtcttctgctctttgccgttaaatttcgtctggaagagagtggtctccgtaggatagtcagcattgctgttcgtgatgcctgttccgaggcagatcatccggttatcaaaacagaagacggatttacgggctacaaagtcgggagtaaagttctcataatcacgttccgtcagtttcattgcaaacattccgttcatgccgcctaaagagctgcttccggaaaagttttccgtagaccgtgccatcgtcgtacctttcaggggactgtccaagagttcaaaaggaagatgaatggtagtcgtaccgggcagacggttccagtcccatccttcctgtacaaaaccacttccggcacgggagacgggatttccttttcccataatctgtaccgatccgtagctttgataacgtccgtaacgattatctttcgcatagatttcagcaccccatacatctgtggtatatcctttcagtgtcaccatccagtctgcacggcggaaaatacctgccgatccatagttataaacaaaaaaaccgtggggagcctgtgcaggctgaataccttcttttctgaagaaatgtgcattccttgtattccgatcacgtatcagacgcaaataatcggcggccagtccatgatcgaatgtatttccctgaccggacaagtctcctgacaatgcaatattggcaaatgcttctatatcatcgcttcccatctttccgccaaaaggatggcgaccgctaatgcctgtcccccattcgtaaaggttacaataattgcgcatggcgagaaaggcagacttgatatgttgacgtgcctcttccgtcagttcaaatccggtcccgttggtgagagcgataaattggccgatagtagccagtactccggttgtatagccgggatagaaacctccgtgatgaaaggtcgttccatctactttgataccgccgagagtgcccggagtataattcagcgatgaagacaaccagcgcgacaaaccattcaaagcctgttcctgttctcttgcatcggggaacatcatggcggagataaactttgccatcaagagcgtatgccatgaatccagtaattcatcccgctccggcggacacggttgacgagtctcctgtaaagcagcccagaaacgtaaagtggatagataggcatcccggtgaggatgtttataaatcgcgtcccgcatgagccaggcggtagtatatattttacgtacctgatagccgtaatgatggttcgtccccatgccgctgccaaaagcgaatccctgatccattgcatagtcgaatacagtaaaatagttcttcttcgatgtctcattctgattgtagaaggcatcgtatgcaaaaccggcaagcatcgtttcgatatcattccatgacatctctcctttcttcttgtcttgctcgtccggtgctacaacaggagttccggtaaagccggttccggctgcggagggagcaatggcagctctttcaaaagtcttccttgcagcgttgatctgtccttggggagctttcttcacatcgagaaattcagtcaggcgttgttcgattgttttcaagtctttcttttgtcgggctgtcagtttagaaagcaaggggacatcataagactgctgttcccacttccatacaagacaccaatgccagagatcacgattggaaagaccgttgttagctggcagttgctggtccggtgtcgtgcgcaggttcatcttcttttccggaaaggtcaggcgatccagaaagatgcgccctttacggtcgggagcaaccagacgataagaaacaatatttttatctttcttatcaccgttcatgtaggcgaaagatatccagcaagcccgccagcctgccgcttgcagatgatacgtgaaccaataagagacttcacccgccttatttagaaactcaaaacggatagagtcctgttggggtttctcgttatatatccacagggtaataccaaattgctgttcctttttggcattcagcgataaaggttctatctgaacgtccagtgtcgaggcaggttggaaatcccattccagactgctttctccctctttatagaaaagagaagaaagtttcacttcacctttccccgaaactttgaacgtctcgggaaccttttcttcaaaccctatgacctgcgcataagaggacaaagaacaaaacaagaacagaaatataaaacaaacagctttcatgatcattaattgtttaaaggcagttcttaccacacccgggtgtcaggatgcacgacacccgggtgtcagcatgtatgagatccgggtgtcggtatgtatgagacccgggtgtcatacaaaccgtattagtatacggtatcagtaaggtatacggtccgaaagaatcttttccgtataccacggatcgtcgatttctttcagcattgttcccatttcacgataaagttgctccacaacttccttattttcatccaaaggcagattattcagctgataagggtcgtttacgtcatcaaacagcagacttttctttagctgtttcgtcttccggtcgatatacagagccaatgtatagcgagccgtcttaatgccgcgcgaagaggggaaataagattgcaccaatccatccttatctttctctccatccagattctgaatatacaacgcacctgccggacgaacaatttccgccttttcatcgaagaaaagaggtgcgaagttgcgtccctgcacctcggaaggaatcgaatcccccagactgcacaagccgagtacggtaggcataatgtcgggagcagaaagcaacaaatcatctacccgaggctgaatcttaccggggaaacgaaccaggaacggaatattcatagattcggaatagggagagttcttagggtcgtccgttcgctggctacacattgtttcgccatggtcggaagcaaagatgactactgtatttttatccaatcccaattgtttcagtgcttccaaaatctgtccgaaagcacggtctactccggtcacagaagcaaagtagtaacggacggattccgcttttttcatattcagatctacgtttgggcgaatcagcagactgtccagcggttgatctttataaagattgaagtcctgttcttcacaatcgttcagcgaacggtatgggctatgcggcgggttcattcccaccatgatgaagaatggcttcttcgtatcacgcacgtttccttcattcttgagataagaaacaactttgcccgactcatggagcggtgaccattctttcggatcatgtctcttgccgtccgtatcccaataatgcgggttcttatgttcgtcaaacgtgccgtacgaataccaatagttgaaaccgtggcgctgctctttcggcgtataagcgtcccacaccggacgctgtgtttctacatattgtcccggattctccggatcattcggggtcgggaagtcagcgtgaagtttaccgaaataagcacaatcataaccggccttgctgaatacgtcgcctatgcactccgcatcgtcacgcaaagagctgataggacgtgtagagttacagttcaaaggtacaccactgcgattcggatacataccggtcagcaacattccacgatgagggctgctcagcggacagttgctttgagcggaagtcagcaccatagattcacgtgcgaaagtatctatgttaggagtatgcacggggtctccccggaagtttactttatctctgaaaccttcctggttccaaaagcccattgcctgattgcgatactgatcaggaaatacatagatgatgtttggatgttccgcttgctctgccacctgcttgggggatttacagccttgcgctgcaaagagggtcaagcctcccatcaataagtttactgatttgtttatcatgatataaagaataacagttaatgcaccaaccggtttcggtacagcaaataatgttttccggttcaccatttaattcgtccgcctatagccggacgaaagattgcctatagccaaacgaaacgttgcctttaggcggacgcaaatttgcctatagccggacgaattaatttatgcaccggaagagactaatatatgcatatatccggctaaagtacaggcaaggcagttcttacttcttttccaagtctcttttgcgcatcaatccttccaggaagtaatagtcagcgtagtttaaaggcacatctatttcctggccgtgagggatactgcctacagagtgcatcagtataaagtttccattcgtacccactttcgcacgataagccggtgagccgaggctttccataatcttatcagcagtttccttatagtgattgcccggcagataaccgtcgagttcgtacagagcagaggccgtacaggcggctgccgaagcgtcacgaggttcgttcggaatgttcggagcatcgtaatcccagtaaggaacgaggtcttccggcaggttcttattggtaaagatgaagttatacaccttctgtgcctgatcaagatacttcttgtcttttgtatagcgatagcaagtggtataaccgtataatgcccaagcctgtccgcgagcccatgatgattcgtccgcatatccttgtgctgtttgtctcttacgcacttctcctgtttcgggatcgtagtctaccacatgatagcaactgttgtccgggcggaaatggtgggccatcgttgtatccgcatgtttcactgctatattgtaaaaggtagagtcaccggaaaaagccgtagcttcaaacagcaattccagattcatcatattatcgataatcaccggacatttccatccgcgtgttccctgccagcctttatcggcatcccatgactggataacgcctgctcccggacggaaacgggtagacaatgattttgcggcttctacaatcacatccttatattcttttttatctgcaaaacggtaaccgttaagataactgcacccgatcataaagccgacatcgtgatgccacttcagatatttcacagaatcgagggcttctgtgtatttttctgccaaaggcaaccactttttatcccctgtcagattgtaagtcagccacatgctgcccggaaagaaaccggagcaccagtcatcaataggtatataggagatactaccatctgcattgatggttcttggattcagaattttaccggatttctcgataatgtctgtctgaattgtgttttgtgctacagcgttgtcgatgttgtcctgaataaaatcgacttcaacctttttttgtccaccgcaactcgtaaagatcagaagcgaaagtcccaatgcgctaagaattgttttcataatacatggattatttgttaagttaataattatctggtggcaaaagtagtactttcaaatagaatagaccgtcccaaataatccaattcagggacaaatttggtacatttctcccttgaagggcatatttgcacagatattccccaaaagcctgcttaattatttaatgtaattgaaaatgtaattataataatctgactaatatataatatattctggtcatttcaaaaaaaaggcattctaactcttctacatttttattatatttatttgtaattaaccgattgattgttaattataattatcatcatcacacctacataaagttatgcaaactaaataagaaattacttatttagttagctttgccatgtcttttctcagtcaaactcttcgttgatgagaatcagacatatatagatatttgtacttaaatctacaacatattatgagcacaacatgccaacatcaacaaggtgaaggatacctaaaactcctaaagatttagatacatattatgcttataataagaaagataggcaaacgttgtaagcaataatatttattgttcggatgcactttaaccattttattatttatatttatgaaaaaccacctaataacagtacttgtctgctgtttattcttcatcggttgtaaagatgataaagccaactctaatcagtatgacccatctcaaccagtagtatttacagattttagccctaaagagggaggtatgcgaacccgcctgtacattgaaggcagtaacttcgggaatgatcccaccaaaattcacattacgatcggtggagaaaaaaccaaaaccatcggagcagatggaaaaaagatttattgcatggttccttccaaggcttttgatggaataatcaatgttcgtgtagatggtccggatggcaaacctattgcagaacatacatttgaagaggaattcaagtacactcctgcaacgatcgtaggtaccttgctacgtaaggtagacgaggataataattctgcatttcaagagggttcgttcgatgaaggagcttctattccttccaatgactgtatggtgttcgaccccaagtacaaggatggggacaaccggttacttttttcttcaaaccattctgacggtctccatctaatagacctgacagaacggactgtaaaacgtctcttcccaagaacgggatatagcacaatgtattctttcacattcagtgctgacggagacacgttgctatttaccgatgatcacggtcaggacaacaccacccgggcaaatatctattattctctccgtcgtgaaaactttcgacgaattcgtccctacaactatggcaggacagcatatagcttagtgtatatggatgacggaaccatcttttacaccacctggtgggagggaaaagtctacaaaatgatacgcaatggggctattcccaatatcgacgagaatgcggaagttgcctttagcctgagtcagatatcggcagtgggcggttcacatacgatattattcaggcacccgtccaataaattcatgtatatgctttccgacaattttggcgcagtgttcagagccgattatgatccggtggcaaaaacattcggtaatcctagcatcattgccggaaacatgaacgataaaagtttcaaggaaggaacgggaggaagcgcccggtttaacaaaccacagttcggtgtattcgtaaaaaacgagaaatacggcgaaggaattggtcctgacaacgaccaatatgacttctatttttgtgacagagaaaatcactgcatctggaaactggatcctcatggggtagcgtctcttgcagccggacgaagtaacgaaaacgccgacggcaaaatatggggatacgtagacggcaatccattgcatgaggcacgtttcaatcagccagccggtcttgcttacgaccctgatacagatatgttctatattggagatattgataataaagggattcgttatatgacaacggaataatactatttaaaacacaagtaaatatgagaaatgtaatcttactatttttattgatagtaggctggacaactacagtctgcgctcaaaatgaacaagagacgattgaggtgacgggaatcgtcactgatccaaagaacgaacctttaataggcgtgaacgttacagcaagaaatatgcccggcttcggtgcgataacagacataaacggacgttacaagatcaaggttcccaattactcttacttgattttttcctatgtgggatttacaaagcaggaaatctttatcaaagacaaaaaaatcattaacatcgttatggcagagacgaaagaaacggtcatcgacgaggttgttgtcacagggaccggtgctcagaagaaggtaactgtgacaggtgccgttaccacagtcgacgtttcccagctacgtactccgacggcaagcatcaccaatgctcttgcaggcaatgtagccggtatactcgcccgccagacttccggacagccgggtagcaatatttctgagttctggatacgcggtatctccactttcggtgccggaggcagtgcattggtgttggtcgatggcttcgaacgtgatatgaatgaaatcaatgtagaagatatccaggacttctccgtgttgaaagatgcctccgcaacagccatttacggttcacgcggtgcaaatggcgttgtcttgatcacgaccaaacgcggcaaggaagggaagacccgcgtcaatgccaaagtagaaacctcgtataatacacgcaccagaactccggaatttgtggacggtccaacatatgcccgcatgatgaacgaagccttggttagtcgtagtcaggctccggcctatagcgaaagcgacttggaactgtttgcaaacgggctggatcaggatcttttcccgaatgtggactggatgaacttaatactgaaagacggtgcccccacttatcgcgcaactgtagacttgaccggaggtggtacggtagcccgctatttcatttctgccagttatgtaaatgaaggcggcatgtacgagacggatcgtgcaatgacggactataacaccaatgccaactaccatcgctggaactaccgcatgaatgtagacatagacctgacaaaatccacgctgctaaaagtaggcgtatcgggttctttggacaagcagaacctgccgggaagccagtatcatgaaatatggcactcgctaatgggatacagtcccatcgcttctccggtacagtatagtgacgggaaatgggcagcagtcggtagtgaaggacgaagaaatccgtgggtactgaccacccaacagggatatcaggaaacatggaagaataaaatacagactacggttaatcttgaacaagatttgaaatttatcacaaagggattaaaattctacggacgtttcggattcgatacatatacggataacggtgacaaccgtttcaaatggccggaaagttggttagcggaacggcagcgtacctccgacggagaattgcaattcagaagaatagagacgcagaaactgatggacggaacgatgtattcaagtggacaacggaaggaatacttggaggcagagctacactataaccgtacgtttggcgaccacatgctaggggccgttttaaagtattctcaggataagactaccaatacatctcacaacggcaatacagatagctacgagaagattgtgcagagtattcagaatcgtcatcaggggtttgcaggacgtttcacatacggatggaaataccgctacttctttgactttaatttcggttacaacggctccgagaacttcgcctcaggtcagcagtttggattctttcccgcctattctgtagcatggaacatcgctgaagagtcaatcatcaagaaacatctcaaatggctgaatatgtttaagctgcgctactcatacggtaaggtaggtaacgacaatgtgggaacccgcttcccatacgtagagaaattcgggacatgggatgaagacggttattattacggtgatatcggcaccagtaattattattataccggactgacctattcgagaattgcgtcaagcagcatcacttgggaggtagccaagaaacatgacctcggacttgacttctctatgttcaatgataagttcagtggcagcattgactacttccacgaacaacgcaacggtatttatatggtacgtagttaccttcctcagatcatcggtctgaatcacatcacaacgaaaccttatgccaacgtgggatctgtcttgtccgaaggttttgacggtaatatcgcttataagcagagaataggtgaggtagatcttacagtacgtgccaacatgacctatagtaagaatgaaatcaaggagtatgacgaagagaacagccgctatccgtataagatgaaatacggattccgtgtagaccaggcacgcggcctgatagccgaaggattgtttaaggattatgaagaaatccgcaacagaccctcacagggttcaggcatcatgccgggagacatcaaatacaaggacgtaaacggtgacggagtcattaacggagatgacgaagtgcccatcggtgcgaccacccgccctaacctgatttacgggttcggtgtatctgcacaatggaaaggatttgatatcaacgttcacttccaaggagccggcaagtcatccttcttcatagacggattcaccgtatatccattccaagagaagtcatggggcaatattctgacggatgtagtgggtaactactggtcgctgggaatcaacgaagacccgaatgccaaatacccgcgtctgagttatggaggtaatagcaacaactatcgtgcttctacttactggctgcgaaacggttcgtacatccgtttaaagaatgtggaattaggttacagcatccccaaacggtttgtcaataaactccatttggaccgtgtacgcctctacctgatgggaacgaatctgctgaccttctccgactttaagctttgggatccggaactgggtagttccaatggacaacaatatccgttatccagaacagtgaccatcggactgacggtaggaatctaaaacaatcattaaaagaaaagttatgaataaaaataaatacattttattgggagcagtggtactcggcttgggactcacttcctgttccgatttcctaaatgtagaccgctatttcagagaccaacaatctacagaacgcattttctcggacaaagactatacacttcaatggctgtcattctgctacagtcgcctgcagggagataatctggaggtgggacacagtgacgtatgccctttcaatttctcagacgaccaagtattcaacgaacgaggagaccgttttgccaaattcaaacgcggcgaatatttaaattccactggtggccaaaatgcttggaaatggtcgtatgacggaatctatcaagcctccattctactgaatgaattgtatgagaatgaagatctcactccggaggaagtgacggacataagaggacaggcccgttttctgcgtgcctatttctactggttactgctgagaaaattcggtccgatacccattctaccaccggaaggagccgactatacaaaatcgtatgacgaactggcctacccacgtaaaacctatgatgagtgcgtggcattcatcacttcagaactcgaaattgcagctaccgaactgttcgaaaaacgcgataacttgaacattgcccgcccgactaaaggagccgcgctggctgtacgtgccaaagttttcctttatgctgccagtccgctggtaaacgggaatacggaaatggcagacttcatcaacaaggacggccaacagttgattccacaagaatacaatgaagagaagtgggcaaaagccgctgctgccgccagagacatgatcgagtactcggaaacgagcggactctacaaactttatacttttgaaaggcgcccggttagtacagacgaggcttatccaaccactattgaaccgccatatcatgaggaatacagtaacaagccttttccggaaggatggtccaatatagatccatttgaatcatatcggtctctttttaatggagatatctatgcagccgaaaacccggaacttatttttacccgaggaaccaatggtgacagcaatgacttaaaaacagacaacacgatggtagatttcgtaaagcatcaactgcccggaacttttggaggatataacgtacacggaatgaccctgaagcaaagtgaagcatacgctatggcagatggtacatcatttgacaaagaatgctacacattatggaaagggaagttcacaaacgatgaaaacaaagatgaacacaagtacgacaatgtaaaaaatggcgtatggtggggatataccaaccgtgagcctcgcttctatgcttccgtagctttcaacggagcacaatggaacgcactgagcattaaggaagaaggaggaaaagactcacgaaacaaacaaatctggtattatcgcggagcaaccgacggtcgtatcaatggatctgataactggtgcattacgggcatcggcatcatgaaatatgtaaatccgaacgattgcgccaaatggggaggctctatctaccaaaaagtggaacctacacttcgttatgccgacatattactgatgtatgcagaagcactgaataatatttccgaagggacacactaccaggtggcctcatgggacggaagccagacttacgatatcttccgtgacaaagaacagatgcgccgtggagttaagcctgtccgtatgcgtgccggagtccccgactatagcgatgaagtatatgaaaacccgaaaaaattctttgaaaaaatagttcatgaacggcagatcgaattctttgcagaaacccaacgctactatgacctgcgtcgttggaaaattgtcgaagaacatgaaggagaacaaatctacggttgcaatacactgatgaacgaagaatacaaggacatgttttatctgccagtcagagtggccgaactacagacttctttctcacgcaaacagtacttctggcctatcagcttcgatgagctgaaacgcaacaataatctctcacaagctcccggatggcagaattatgattagtgttaacattataaaccaaaagatcaatatgagaaaattatatattttaggaatgatactggggatgtatgcaacattcagtgcatgcaatgacgagtggaaagatgaactttacacacagatgctttctttcaaggcacctttaggtgacaacggcttgagtgaaatttatgtacgctatcagccggatggaacaggaatataccagttgccggtcattgtcagcggctcgaaaagcaacagtcggaatatcgatgcaaaaatagccgtggatgaggatacgctccgaatacttaaccaggaaaaattccccgtaggtcgtcaggacctctggtatgtcccccttgcagaacagcattattcttttgaatcaaacatttgccatattcctacgggagagaatatacagctctaccccatccatttcaactttaacgggttggaactggatgagaaatacgtacttccgctgactattgaagaagacccttcttatgttcaaaacaaatataagggacgttataaagcgctgctgggagtcaatctgttcaatgactactccggaacgtataacaccacgctgatgaacatctacatcgaaggaacgacaaccgatcccgctaaggtagatacgcgcttagcccgcgtagtggacgagaataccattttcttctatgccggttcaacgtgggtggaagatgagaaccgctccaggtataaagtattcgtcgagtttgaagaaggaacggaggacgaggaaggtactattaaaggaaagttgagattgtacggtgacgaaggcgaaccgggaatcaatatccgaccattgggagaatgcaagtatgaaaaacgaatcattcagcacgaaaccatcaaatatatggaacgccaccttaccacactggaactgagttataagtacacggatgtcacttccaatccggattatccgatgacttacgaagtaaaaggttctatgacaatggaacgccagatcaacccgttgataccggatgaggatcaagctattgaatggtaagaaaaaataaaaaaaggagaagacaagcacttgattaaacatcgaagcttatcttctcttttttctatcagggtgcttcttatagcatttttattagattatatgaatgcaaacaccatactgttcataaggtattcgagactgatgaagaataataactccctaaaaacgtaagtatccgacagccatatatgggaatatatttattacatttgcggaagaatcttgaattttaaattataggctaattcggctctcataacttatcattcaacgtttcaaattagtaattcaaaattaatcattatgaccccacaagagttttttaaaaaggacctgttcgccgaaaatgcaggcgtagtattgcttgaagtacgcgaaggatacagcaaagccagactggaaataaaacccgaacatctcaatgccggagcacggacacaaggaggagcgattttcacgctggcagacctggcactcgccgcagctgccaattcgcacggaacactcgctttctctctttcatcctcaatcacttttctgcgtgccagcggtccgggcgacaccctttatgccgaggcacgcgaacggtatatcggccgaagcaccggcttctatcaagtagatgttactaaccagaacggagacttgatcgctacattcgaatcaagtgttttccggaaagatcagaaagtaccttttactctgtagacggactatttaactatagaagtcaatggatgacggtgacctctgacatcatttaagaaagctttggctgaaccgaaattcaagaacatatctaaacggacaggaaggtggttcttatcatctgttacgaagaaagtaatcacttccttttccttcccttttttatcgtattcaactaatgagaagatcaggcagcgataggtaaccccattttccgctttcacattctcttttccccgataaatcagtgtctgctcttccactttacgtccggtagccatcgggaatttgattttatcgcctaccttataatctgcagggtcataagaacgtgcctgagcaaggatagtcagcatatcgtagatgcagcgactgtcgctttcttccgactcctgaacttctccgtcacggaacgtacgtttttgtttggcaaagcaaagaccgtctttataagagaaccaagcctcatctaccgtataacgttttccttcctcggcacctttacggaaataacgaggttccagtttttcacccatgacgcaagtcagtgtatcgcgcatcttaaaaaagaagtcggcacgcttgctacctaaggcaagcagattgatacggtaagccggttccgaatgataggtagttgcattagtcgtcagactggctatacctgctttcacccaaacgaatttccagttgaagtacaagtcatacattacgtgctctccggattgaaaagcatcgtttttagcttcacactgagcattggcaggaagcgcaaaacttcccatcaacaatgcaagaattccaacaattagatgacgtcgcaaattagcgacggttacggttttggttatttctatctctttctctttctttctttttcttgtcttcatctggtttttgtttttttagttcatccagtttctgtttgtctacaggagttgcgtgtatatcccagttttggtcaacatcccataacgctttatattcaacaaccttggggaaatagtaaacttcttccggttgtattccttttgcatagtctcccgtgtcccattctccgtttccatttctatcattaatcagtctggcggcatatttccccggattcaggtaatagaaatctgcccttccatcatccaccagtcttcgtcgaaccactttatcttgggtatccagtaattctataaatgcctgaggatctgctcctgtaacaataaaatgaagagtaaaatattcatcctcactacgtaccttaaatgattgttttatcttatcggtaaacaaaccataaatgccatgaaatgcagttgagtccaccgagaactcatattccattgtagcgtcccaatcatttgccggatacagattaaaccgcctcagattcaatgagtcttgttcgaattcgaaaggaatatctttccaaattgtatccaccttctgccgtagatgaattgccgcagtatcaaaacttgcaatcggctcctcaaagtttaaagaaacatagccatacacgtccattgatgaaggtgcattcacattcaccggtaagaatttagtcggtatcggctcatcttcttcaccctctttctttttcttctttttcttcttctcgggctcttctttggtcagagtcttttgtttggataccaatttcaaggtatctgtacgcggaattaactggttcagcgtatccgtataaagataggtaaggctaagggccagagtatcctgtttatagagcaaagagtcctttacccaataatgaatcgtatcgttccgttggttcttttctatcacaaaagcctccttttcatcgaagttcaaccctttcagtacaggcagggtatctgctttgccagcaaaataaaaggtgaatttctggggaaccagtcgttcggactttatcaaatattgcgaataattgagttctttaaaagcacggagaatcacatcatccggcaaataatgcatatatttcttctcaacgatcgtatcataagtcaatgaatccacccaagccgtatccatacgaagtctttcttccatacgggggatgatcagtgaatcattaaaagcaatgacctcactcttctgagtgaaagcaaagttctgatctgaatccatcaagccaaagatacgatacttgccgggagctaccccacgaatagagaaacgcccacggctgtcggtacgtgccacacggtcgaaaggaagtttagtaaaggcggagtcattcagatttgcatgcagtccgaccagtatacctttaataggctccaagttagaggcgtcaagcaccgttcccgatacttccattgtatcgatctgcgcaccggtagaaaaagtaaatgcaaaattacccagaggattgccttcgttattatcgacgatggcatccgagaaatctatagtataggtagtattaggctttagtgagtcaagcagattcacttgtattttctttccggaagcctttatctccggttgttgaatctgaggaggagaaacaaccactttctcggttgctttctctagcttaataaactcatcgaactgaagagaaactttagtcctcttattattaatcgcacctgcagcaggggtactgccgacaaaacgcggaggatcgtaatccttaggcccgccttccggccgtccaatgctggcacaggagtacaatatagccaccagtgcaatcaccggaagagctttgcgcacgatatgttttatcttttgattctcaaattgtaacatggtgcaaaaataaacgttcttcaccaataaacactacactttctagctaatttattaaaaagtagccttaaatgaatgattattggtccttatcttgttaataaatccctatctttgactcccgaaattcaaacctaatacaaaaaacccatgaagaaacaactactttcctgctgtttggctgcactaggactaacaacagccatccaagcacaaaactttaacgagtggaaagatccggaagtgaattccgtaaaccgctccgcaatgcacactaattattttgcctatgcatcagctgatgaagctaaagcgggcagcaaagaagactctcagaattttatgactctgaacggtctctggaaatttaactgggtaagaaatgcagacgcacgcccgacaaacttttatcagacaagttttaacgacaaaggctgggacaatattaaagtacccgccgtttgggaattgaatggttatggcgatccgatttacgtaaatgtcggctatgcctggagaaaccaatttcagaacaatcctccccttgtccccacagaaaacaatcacgtaggctcttaccgaaaagaaatcgttcttcctgctgactggaaaggaaaagacatctttgcccacttcggctcggtaacttccaatatgtatctttgggtaaacggccgctacgtaggctatagcgaagacagcaaactggaagccgaatttgatctgaccaactacctgaaacccggcaaaaacctgattgcctttcaggtgttccgttggtgcgacggcagttatctggaagatcaggacttcttccgttattccggcgtaggacgtgactgctatctgtatgcacgcgacaagaaacgcattcaggatatccgcgtcactcccgacctggacagccagtataaggatggtacactgaacatagctatcgacatgaaaggcagcggcactgtagctcttgacctgacagacgcacaaggaaaaagtgtagccacagccgatctgaaaggttccggcaaattggacacgactatcaacgtggccaatcccgccaaatggactgctgaaacacccaacctctacacattgaccgctactctgaaaaatggaagtaccattactgaagtgatccctgtcaaggtaggtttccgcaagatcgaactgacaggcggacaaatactcgtcaacggccaaccagtactctttaaaggagcagaccgtcacgaaatggacccggacggaggttatgtcgtttccctcgaacgtatgatacaagatatcaaggttatgaaacagcttaatatcaatgctgtacgtacctgccattatccggacgacaaccgctggtatgacctttgcgaccaatatggtttatacgtggtagccgaagccaatgtcgaatctcacggaatgggatatggagacaagagccttgccaaaaaccccatttacgcaaaagcacacatggaacgtaatcaacgcaatgtacagcgtggttacaaccatccgtccatcatcttctggtcattgggtaacgaagccggtatgggacctaacttcgaacattgctatacatggatcaagaacgaagacaagacacgtgccgtacaatatgaacaagcgggaaccagcgaattcaccgacattttctgcccgatgtattatgattacaataactgtatcaaatattgtgaaggcaacattgacaaaccccttatccaatgcgaatatgcacacgctatgggcaactcacaaggtggattcaaggagtactgggacatcacccgcaagtacccgaaatatcaaggtggatttatctgggactttgtcgaccagtcctgccattggaaaaacaaagacggtgtagccatctacggctatggaggcgactttaacaaatacgacgcttcggacaataacttcaacgacaacggcttgatcagtcccgatcgtgtaccgaacccacacgcttacgaagtaggatacttctatcagaatatctggactactccggccgatctttccaaaggtgagatcaatatctataacgagaacttcttccgtgacttatccgcattctatttggaatggcagttactggctaacggagaaatcgtacaaaacggcatcgtatcagacctgaatgtagccccgcaacagactgcaaaacttcagctgccattcgacacaaagaacatctgttcttgcaaagagttacttctgaacgtcagctacaagctaaaagctgccgaaacattgcttcctgcgggagaaaccatcgcctatgaccagatgagtatccgtgactacaaggcaccggaactaaaactggaaaacaagcagtcctccaatatcgcagtcgtagttccctctttccagaataacgaccgcaactatctgattgtttccggcgaagacttcacgctcgaattcaacaagcacaacggctacctctgccgctatgacgtcgacggaatgcaactgatggaagacggaagcgcactgactcccaacttctggcgtgctccgaccgacaacgactttggagcaggattacaacacagatatgccgcatggaagaatccggaactgaaactgacttcattgaagcatgatatagaaaacgaacaagcagtggttcgcgcagaatacgacatgaaatctattggtggaaagctattcctgacgtataccatcaataataagggagcagtaaaagtgactcaaaagatggaagcagacaagagcaagaaggtttccgatatgttccgtttcggaatgcagctgcgtatgcctgtcacctttaatgagatagaatattacggacgcggaccaggtgaaaactattctgaccgtaaccacgccgcaaggatcggcaagtaccgccagaccgtagaagaacaattctatccatacatccgcccgcaggaaaccggtaccaaaactgatatccgttggtggagactgcttaatatcggcggcaacggactgcagtttgtagccgatgcaccgttctccgcttccgcactgaattatacaatcgaatcattggatgacggtgccggcaaagaccagcgtcactcaccggaagtagaaaaagccaacttcacaaacttctgtattgataaggcacaaacgggactcgcctgcgtaaatagctggggtgctatcgctttggaaaaataccgtcttccatatcaggattatgagttcagtttcataatgaatcctgtatatcataaactgaagtaaaaaacatagttaaaaaacacggtatcagagtacaagaataccgaatttaaagtacttttgcagccggaaacttatttcatggaataagtttccggcttttcttccttagatcatctatccatacaatgaatgtacacagcgacgaacgcacaattttaaaaaacagataaatataaagtatgaaaagtagaattgttttttttgcattttgcttagccctcttgtctagttgcggcaataagggcaatgacacagggaaagtcccagaatatgcagtacaagaattacagaagacaactgcagatctaatgaaagcttatccggctactatcaaaggtagacaagacgtagaaatccgcccgcaggtatcgggattcatcacaaagttatgtgtagatgaaggagcaaccgttcacaaaggacagctcttattcatcatagaccctactcagtatgaagcagcagtacgcacagcaaaagcttcagttgcaacagcagaagcagccgtgaatacacaacaaatgactgttgacaataagatcgaactgaacaagaaacagattatcagcgattatgacttgtcaatggcgaagaactcactggcacaggctcaggcacaactcgcccaggctaaagcacagctgaccacagcacaacaaaattactctttcacacaagtaaagagtccttcagacggtgttatcaacgacattccttatcgtttgggagcactcgtaagcccctctatggctacgccaatgactacagtatctgaaatagacgaagtatatgtatacttctctacaactgaaaaagaactgctggctatgaccaaaaccggaggaaccatcaaagaagaaatcagtaaaataccagccatcaaactacaattgattgacggcacaacatatgatgcagaaggaaaggtagacgctatcacaggagtgatcgaccagtcaaccggttctgttagcatgcgtgctatcttccctaacaaggagcatatgcttcgtagtggtggaactgccaacgttctgatcccttataatatggagaacgttatcagcatcccacaatcggctactgtagaaatccaggacaaaaagttcgtttacgttctgcagccggacaacacggtgaaatataccgagatcggtatattcaacctggacaacggagaagaatatctggtaacttccggactgaaccccggcgataaaatcgtaatcgaaggtgtacagagcctgaaggacggccaaaaaatacagcctatcacgccggctcaaaaagaagcgaactatcaacagcatttgaaagaccagcacgacggaaatttagctacagctttcaactaataatttagataatcgtatgaaattagataaattcattaaccgtccggtactatcaacagttatttccattttgatagttatcctaggtgctatcggattggcaacactgcctatcacacagtatccggacattgcgcctcctaccgtatcggtaagagccacatatacgggtgccagtgcatcaaccgtattgaactctgtaattgcccctctggaagagcagatcaacggtgtagaaaacatgatgtacatgacttccaacgcatccaataccggttccggtgatatctcgatctacttcaaacaaggaactgatccggatatggctgccgttaacgtacagaaccgtgtttccatggcacaaggtttgctacctgccgaagttaccagaatcggtgtgactactcagaaacgtcagacatccatgctggtagtattctctctttacgatgaaaccgatacatatacagatgctttcatcgagaactatgcaaaaatcaacctgattcctcaggttcaacgtgtacagggtgtaggtgatgccagtgtgatgggtcaggactactccatgcgtatctggctgagaccggacgtaatggctcagtataaactgatccccaacgacgtatctaccgctttggctgaacagaatatagaagcggctccgggacaattcggtgaacgtagtaaccagactttccaatataccattcgttacaaaggacgtctgcaacagccggaagagtttgagaacattgtcatcaagtctctgcctaacggtgaggtacttcgactgaatgatattgcggagattcagctggaccgtctgggatataactttaccaaccgtgtaaacggacacaaagctgtaacctgtatcgtttatcagatggctggtacaaatgctacgcaaaccatcactgatatccagaaattattggatgaagcatccacaacactgccttcgggattgaagattaacgtttccatgaacgccaacgacttcttgttcgcttctatccacgaagtgttgaagacattgatcgaggcatttattctggtatttatcgtagtatatatcttcttgcaggatttgcgttctaccttgattccgaccattgctattccggtagcccttatcggtacattcttcgtactgtcactgatcggattcagtttgaacttgctgaccctgtgtgcccttgtgcttgccattgcgattgtggtcgatgatgcgattgtggttgttgagggtgtacatgccaagctcgatcagggatatacatccgcccgtctggcatctatcgatgcgatgaacgaattgggtggtgccatcgtatctatcacactggtcatgatgtccgtgtttattccggtaagtttcatgggtggtacggcaggtacgttctatcgccaattcggtttgacaatggctatcgctatcggtctgtccgcattgaacgccttgacactgagtccggcattgtgtgccgttcttctgaaaccgcatactgatcacggagataagaaacaaacacttgtttctcgcttccacacttctttcaatgccgcttatgactctatattaaaaaggtataagaaacgcgtactcttctttatccagaaaaagtggttgtcaatgggactggtggttctctctatcgtattgctgatcttctttatgaacactactccgacaggtatggtccctaatgaagataccggtacgctgatgggagctgtaacgctacctccgggtacatcacaagaccgctcggaacaaatactggcacgtgtagacagtctgattgctgcggaccctgccgtagcttcacgtacattgatctccggtttcagtttcattggtggtcagggaccgtcttacggttctttcattatcaaactgaaagactgggatgaacgctccatgattcagaactcagacgttatcgtcggttctttatacatgcgtgcgcagaagattatcaaggaagcacaggtattgttcttcgctcctcctatgatccccggttactcggcatctacggatatcgaggtgaacatgcaggacaagacaggtggtgacctgaacaaattctttgatgtagccaacaactacaccgcagcattggaggcacgtccggaaattaactctgccaaaacaaccttcaacccgaacttcccgcaatatatgattgatattgatgcggcagcttgtaagaaggcaggtatcagcccaagcgatattcttagcacgatgcagggatattacggaggtttgtacgcatccaacttcaaccgtttcggtaagatgtaccgtgtaatgatccagtcggacccgttatcacgcaagaatctggaatcactgaataatgtcaaggttcgtaacaaccaaggcgaaatggctccgatttcccagttcatctctgtagagaaggtatacggacctgatattatcagccgtttcaacttgtatacttccatgaaggtgatggtagctccggcttccggttatacttccggtcaggcactggctgcactggcagaagtggccaaagaaaaccttccggcaggttacacctatgaactaggaggtatggctcgtgaggaagcacaaagtagcggcagtacgaccggtttgatctttatcctttgtttcgtgttcgtttatttgctgttgagtgctcagtacgaaagttatattcttccgctggccgtattgttatccattccgttcggtttgctaggcagcttcctgttcgtcaacggaatgagcgcgatcggtagtatatcggccttgaaaatgatactcggtaccatgtccaacaatatctatatgcagattgcgttgatcatgttgatgggtctgttggcaaagaacgcgatcctgattgtagagtttgccctcgaccgtcgtaagatgggtatgagcatcacatgggcagccgttctgggtgccggtgcccgtctccgcccgatcttgatgacctcccttgctatggtagtcggtctgcttccgttgatgttcgcattcggtgtaggtgcccacggtaaccgtacactgggtacagcttctattggtggtatgttgatcggtatgatctgccagatcttcatcgttcctgctttgttcgttatcttccagtacctgcaagagaaggttaaaccgatggaatgggaagacatcgacaatacggatgccgtaactgagattgaacaatacgctaaataatgaaattcgatatgaagaaacagattctatatatggtgtgtgcaactgctctcctgagcagctgccacatctataagtcgtatgacagacccgaagatattaccgcttccggcctgtatcgtgatccggcagcggacaatgatacattagcttcggataccaccaacttcggtaacctgccgtggagagaagtcttcaccgacccacagctccagtctctcatcgaacagggactgaaacaaaacactgacctcctttccgctgcattgaacgtcaaagcggcagaagcgtctctgatgtcagcccgactggcttatgcaccgtccatcggtttgtctccacagggaacaatcagcagttttgacaagaacgcagcaactaaaacgtactcattgccggttactgccagttggcaagtagacctgttcgggcaactgctgaactccaaacgaaatgcacaagtcaccctgaaacagacaaaggcttatcgccaggctgtacagacacaagttattgccaacattgccaacatgtattataccttgcttatgctcgaccgccagctggagatcactcaggctacggctgaggtactgaagcgtaatgctgaaaccgtacaggcactttcggaaagatcgacctacacatctgccgctttagcacaaagcaaagctgcctatgcacaagtagtggcttccatccccgacatcgagcagagcatccgcgaaacggaaaatgccctgtctaccttcttgggagaagctccgcacgcgatcaaacgtggtgtactggaagcacaggcacttcctgaggaactttccgcagggattcctttgcagttgttatctaaccgtccggacgtaaaagcagccgaaatgtctttggcaagttgctattataatacgaactctgcccgtgccgctttctatccgcagatcactcttagcggttctgccggatggacgaacagtgcaggttccgccattatcaatccgggtaagttactggcttccgctatcggttcactgactcagccattgttctaccgtggtacgaatatcgcccgtctgaaagcagcgaaagcacaggaagaacaagctaaattatctttccagcaaacgttgtacaatgccggaagcgaagtcagcaatgcgctaagtttataccagaacaccagtaaaaaggctgaatcccgccaaatgcaggtagaatctgcaaagaaggcttcggaagatacaaaagaattgtttaacttagggacgtcaacctatctggaagtattgtcggcacagcaatcttatctgagcgcacagatttctcaggtttccgactgtttcgacaagatgcaggctgtggtcagcctctaccaggcattaggcggtggaagagaagattaactttaaacatatactattatgattagtccgttagcttacgtagaccccgaagcgaaattaggcaagaatgtaactgtcttgcctttcgcctacatcgagaaggatgtggaaatcggcgatgactgtaccatcatgtcatacgccagtatcctgaaaggtaccaaaatggggaaaggaaacaaaatacatcagaatgctgtcctgggagcagaaccgcaagactttcactatacaggggaagaaagcagtctgatcatcggagacaataacgatatccgtgagaatgtagtaatcagccgtgccacttttgcaggaaatgctaccagaatcggaaacgggaactacctgatggataaggtacacctttgccatgatgtgcagatcagcaataattgtgtggtaggaataggcactacaattgcaggagaatgctcattagatgattgtgtgatcctaagcggcaacgtaacgttgcaccaatattgtcacattggtagctggacacttgtacaaagcggatgccgcatctccaaagatgttcctccctacgtaattatgtccggcaatcctgttgcctatcatggagtgaatgcagtcgttctgtcacagcatcacaatacgtcggaaagaatccttcgtcatattgccaatgcttaccggttgatctatcaaggtaatttcagtgttcaggatgctgtccagaagattatcgatcaggttccgatgagtgaagaaatcgagaatatcgtgaatttcgtaaaaggttcggaacgtgggattgtgaaatagacaaaatacacttttcatagagaaagggtgatgtccgtaaaaagacatcacccttcttatttattcaaactccagcgtaccgaaaaagtcgggacgatggaagtccggtttctcaatctttatcggattccatgacaggaaatgaggggtttgcagttcatccccgcatttatagaaattcgctttaacttcctttccatccagtgactgtatctgatgcttgaagaatgcagcataaggaataatcaaggctacttcccaagtcgtatcgtccacacgttcttcgaagggttcattgcccagactggaccaacgctgcacgagagccgtcacttctttcggagcgtgttcccgaccgttacgggctggtccggcaccgatcagaatcgttccgatgcagttacattctatattataatagattccgtcactggccggaacagagaaaaactccacacaggaatcagtccatacagatccattgtcttctccatacttggcacgtacactttcttctctgactttgaagtgcaacagaatagaatctttggtatgcgcaatccggaaacttacttttggcttgtaaggatattcagcccagttgacacactgaaccggctggaaatctatcttttcctcatcaaataatttaggaagcgaacaagcctctacattagcagaactaattttctttactttcatatatctttcgtttggaggatacaaatatagttactttctcctaataaggttcccgaaaatcaaataaaaacaatatatttgccattagtaataccctaaacaaccgaattagtgagaaaaacaatccttttatttctgctatttttaagcgtaactgctgtccgtacgttaggacaaaatattactttcagccatttgaccacagatgacggactttcccagttttccgtcaacagcctgtacattgacgaacggggcattatatggataggtacgcgcgaaggactgaaccgttataacggtaacgatatcaaaagtttcaagctcaagaagaatgatccgaacagtctgttcagcaataccgtactccgtatcacaggtaataagaacgggaaggtttacctgctttgcaccgacggtgtagccgaatttgacatgaccactcaacgattcaaaaccctactgcaaggcaatgtggacgctatctactacaacgaaaaactatatatcggaaaaagagaagaagtattcgttttcaacgagaacacgaacaacttcgacctttactaccaccttgccgggaaagacattaacctatcctgcctccatctggacgagaagaaaaacctgtggatgggaaccaccagcaatggtgtttactgcctgtcggacgacaagcaactctctcagcccatcacgaaaggaaacatagccagcatctacgaagactcatccaaagaactgtggattggcagctgggaggaagggctctaccgtatccgcacaaacggcactatcgataacttccgccacgacccgaagaatccgaacagtatatgttccgattttgtcagaagctgctgtgaagataatctgggaaatctatggatcggaactttccacggcttgaaccgctacgacaaaagcacaggacagttccaactttataccgccaatgacaacaaacccgacggactcacccactcttccatctggtgtatcgtgaaagacgaacagggaaccctatggctgggaacttactttggcggcgtcaactacttcaatccggaatatgaaatctatacccgctataaagtgggagacacggagaaagaaggattaagcagtcccatcgtcggcagaatgacggaagacaaagacggtaacttatggatctgcaccgaaggcggtggcgtgaacgtctacaaccggaaaaacaatacttatcgctggtaccgccatgaagaaggcaggaacagtatctcgcacaacaacgtcaaggcaatctattacgaccggacagaggagattatgtggatcggcacacacttgggaggactgaacaaactcgacctgcgcaccaaccgctttaccgtttaccggatgaaagcgggcgacccgaccacactgccctcggacattgtacgcgacatcgtgccctacgaagacaaactgatcatcgccacacaaaacggagtctgccttttcaatccggcaacaggcacctgcgaacatcttttcaaggataccaaagaaggcagaaatatcggtatggtggccagcctctacatcgacaaggacgaaacgctatgggtttccgctaccggagagggcgtatattcttaccgcttcgacaccggcaagctcacccactatgcacacaatccctccattccgaacactctcagcaacaacaatgtcaacaacatcatgcaagacagcaacggcaacctgtggttctccacttccggaagcgggctcgaccgttaccgcaaggagagcaacgacttcgaaaacttcgatatgcagaaagacggactatccagcgactgtatttacgaagtattcgagtcgtccatacaaaagggagacttgctgctgattaccaatcagggattctcccagtttgactatccgcaaaagaagttttacaactacggtacagagaacggattcccgctgactgccgtcaacgaaaacgcattgttcgtaacgcatgacggagaagtatttctaggcggcatccaaggcatgatttctttctgggaaaagaaactgcactttacgcccaagtcctacagcatcatcctttcccgcctgctggtcaacggaaaggagatcactgccggagacgacaccggcatcttggaacagtccatcgcctatacaccggaaatcagcctgaaagccgaccaatccatgttcagcatagaatacgccacttccaacttcatccctgccaacagaaatgaaatcgtctaccgcctcgaaggtttctccgacgaatggaatcacaccgaccgcaaacagacgcttatcacttataccaacctgaatccgggcaaatatacgctcgtcatcaagtcggacggagacggtatcgaagaagcccgactactgatccgtgtattaccgccttggtatgagacatggtgggcttatctgatttacaccatttgtaccgtcagtctgttatggtatctcattcagaactacaattcccgcatcaaactgcgtgagtcactgaaatatgaaaagaagcacatcgaagacctcgaagcattaaaccaatccaagctgcgcttctttaccaacatctcccacgaattccgcactccgctgacgttgatcgtgggacaggtagaaacgctgttgcaagtacagacattcacacctaatatttatcacaagatattgggaatttacaaaaacagcctccaactgcgtgaactaattacggaactgctcgacttccgcaagcaggaacaagggcacatgaaaatcaaagtcagccgacataatctagtgaacttcctgtacgagaattatctgttattccttgaatacgccagcagcaagcaaatcaatttcaagttcaacaagcagtcggatgatattgaagtatggtacgaccagaagcagatgcagaaggtagtgaacaatctgctgtccaacgcattgaagcatacgaaagcggaagataccatctccatcaacgtatcgcaggagaataaatacgtcattatcgagatcaaagacacgggaacaggcattgccgccgccgagatcgacaagatattcgaccgtttctaccagaccgaacgcctcgactcgctgaataccggagccggcacaggcatcggactggcgttgacaaaaggtatcatcgaacttcatcacggaaccatccgtgtagagagcgaaccgggcaagggaagccgttttatcattacgttgaaatcgggcaaccagcactttactgaggaacaaatcatacgggacaacaccgacaccaacattcagcaacaaccggaaacaatcgttccaaccgtagaaatactgcccgattccgaatggaaggaggaagacaacaaacgcatcgaagatgcgaaaatgctgatagtggaagacaacgaatccatcaagcaaatgctggcaggtatcttcgaaacgttctatcaggtcaccaccgcttccgacggtgtagaggcactggatatcatacagaaagatatgccaagcatcatactgagtgacgttgtcatgccacgtatgtcgggtacggaactctgtaagcaaatcaaaacggacttcaacacctgtcacatcccggtagtactactgacggcacgcacagccgtggaacacaacattgaaggattaaagatcggcgcggacgattatatcaccaagccgttcaataccaatctcctgatctcccgttgcaacaatctggtgaactcacggcggttgctacaggagaaattcagcaaacagccacaggcttttgcccagatgcttgccactaacccgatggataaagaaatgctggaccgtgccatggccatcatcgaacggcacttggataatacggactttaatgtcaacatcttcgcccgtgaaatggggatggcacgtaccaatctgttcacgaagttgaaagccgtcaccggtcagacaccgaacgactttatattaagtatccgtctcaagaaaggagccgtcatgctgcggaacaatccggagctgaacattacggagatttccgaccgcatcggtttctcttcttcccgctatttcagtaaatgctttaaggagatttatcacgtcagtccgcttgcctaccgcaagggtgaagaaaaagaggaagaagggaacgaagaaacggatcaataacccacaaacaggtaagcaagtagcatttgtaacaggagaacctatgccaaagtagttccctcctgttggcacacttgtgccacgctgctggcacgaccgtgccatcgcagtggcacagctgtgccaacagcgtggcacaagatccgggctacgatgtcaggaaaaggcatccgtagccccgaaacatttaaccctttagaatggactattttgtatcacacctgtacattcctgctcactcatttccgccaatcctcttatctttgtgttcagtaatcactccataaaagatcaacattatgaagaatgtctcacgtttactaccgctattgcccggtatagccctgctgaccggatgcaatcagaaagtacaaaaagacaacggacaaaactcacaaaagcctaacattatttatatattcgcggacgaccttggcataggtgaccttagctgctatggagcaacgaaggtcagtactccccatatcgaccgccttgccggacagggtgtacagttcaccaacgcctatgcaacttccgccaccagtaccccttcccgcttcggactcctgacaggcatgtacccgtggcgacaggagaacacaggcatcgcccccggaaactcggaactaatcatcgacaccgcctgcgtcaccatggccgatatgctgaaagaagcaggttacgccaccggagttgtcggcaaatggcatcttggactcggtccgaagggaggcaccgacttcaacggccacatcacccccaacgcccaaagtatcggcttcgactacgagttcgtgattccggcaaccgtagaccgtgtcccctgtgtattcgtcgagaacggacacgtggtaggactcgacccgaacgacccgatcactgtgaactacgagcataaagtaggcgactggcctacaggcgaagagaatccggaactcgtaaaactaaaacccagtcagggacataacaatacgataatcaacggcatcccccgcatcggttggatgaccggaggcaagtccgctctctggaaagacgaagacatcgccgacatcatcaccgataaagcaaagaactttatcgcctcccataaggaagaacctttcttcttatatatgggtacgcaggacgtacacgtaccgcgcgtcccacatccccgctttgccgggaaaagcggtctgggaacccgcggagacgtaattctgcaactcgactggaccatcggagagatcatgaacaccctcgacagcctccagctgacggacaacaccatcctgatattcaccagcgacaatggccccgtcatcgacgacggctaccaggaccaagccttcgaacgcctcaacggacataccccgatgggtatttaccgtggtggaaagtacagcgcttacgaagccggcacccgcattccgtttatcgtccgctggcctgccaaagtgaagccgaacaagcaacaggctctcttctcgcaaatcgatatctttgcctcacttgccgccttgttgaaacaaccgcttccggaaggcgcagctcctgacagtcaggaacatctgaacacgcttctgggaaaagacgacaccagtcgtgaatacatcgtacagcaaaatctcaataatacgctcgccatcgtgaaaggacaatggaagtacatcgaaccgagtgacgcccccgccatcgaatactggacaaaaatggaactgggcaatgacaggcatccccagctgtacgatttatccgccgatccatcggagaaaaacaatgtagcgaaacagcatccggaagttgtcagagagctgtccgaactgcttgaatcggtaaagacaagataaccaatgagaatagcagatttgtattattttgtatcaatcttgaataattctatccatatgagaacaatcaatgcgtatatctttgccatcgtaaattcaacaaaatcacttaatttttaatatatgaaaaaacatctatccaaccagacaagaaaaaggatgctctccattttgggaatgctcctgctttctgttccatttgtgcttgcacaagtacttgtcaaaggtactgtgaaggataatctaggagaaggtgttcccggagccagtgttcaggtaaaaggcacttcgcagggaacgatcaccgaccttgacggtaaattcactcttaacatcccccaaaagaacgctaccttggttatttcctttatcggctacgtcaccgtagaacaaaaggcggactcgcaaaaaccaatggtcatcacattaaaagaagatactaaaacgctggacgaagtagtggttgtcggctatcaggaagtacgccgccgtgaccttacaggttccgtggcgaaagccaacatggcggatgtacttactgcccccgtcgcttcattcgaccaggcactcggcggacgtatcgccggagtcaacgtaacctcgggcgaaggcatgccgggcggcaacatgagcatcgtgatccgtggtaacaactcactgacacaagaaaactcgccgctgttcgttatcgacggtttcccgatagaagattcatcggcagccagcacgctgaacccttccgatatcgagtcgctcgacttcctcaaagatgcgtcggctacggccatttacggtgcgcgcggtgccaacggtgttgtcatcatcaccaccaagaaaggtaaggtaggacgggcacagttgtcctatgacggtagtttcggtgtgcagcacgtcacccgcactattccgatgatggatgcttatgagtttgtcaagctacagaatgaaatgtatcctaccgtcgttgccggctcatacctgatgaactacgaaggcaagcaatggacactggacgattataaagacataccgcaatataactggcaggacgagatattcaagactgcctggcagcagaatcatacggtcagacttgccggtggtacggaaggtgtacgctacaatgcttccttatcttacttcgatcaggacggtacgctgatagaaaccggttacaaacgtatgcaaggacgtatgaacacagtagtccgtcgcggcaaactgaacatgagtctgaccaccaactattcacgctctatccagacaggtagtactccatcatccacctcttacagtggtatgaacaaccttttctatagcgtatggggataccgtccggtgacttcccccgacactccgctcagcttcctgatggacagttcaacggacaacgccgtagattcaagcaacgactaccgtttcaacccgatcaaatcacagaagaacgaataccggaagagctacaccaacaatcttcaaatgaacggattcgcagaatacgaagtactgaaaggactgaaactgaaagtttccgccggatatacttatgattcacgcaagcaggatcagttcaacaactcgaatacccgctacggaggtcctacctctacagataaagtgaatgctcaggtaacccgtcaggaacgcctgacatggctgaacgaaaacaccctgacttatcagactaacatcaaaaagaaacacttcctcaatgtattgggaggtatcacgttccagaactcggactatgagatttattcattccgcacaacgcacatccccaacgaatcactcggtatggcaggcatgagcgaaggacaggcaggtactaccacttcggcaaagtcttcatgggcgatgttatcatacctcggacgtgtgacttacaactatatgtctaaatattacgctaccgtttctttccgtgccgacggttcttccaagttcaacaaggacaaccgttacggatacttcccttccggttctctcgcatggagcttctcggaagaagaatttatgaagccgttgaaaagtgtactgtccagcggtaaggttcgtctgagctggggactcacgggtaacaaccgtatcggcgaatatgattattatgcgctgctggcggtattgaaatcaagagtcggttcgtatacatcgacaaactccctcccaagcggcgtctatccattcgacaatgatgcgacgaatgcaggtgttgttcctacttctctgcccaacaaggatttgaaatgggaaacaaccgaacaatggaacgcaggtctcgacctcggattcttcgacgaacgcatcggtataacgatggatatttaccggaagaccacccgcgacctgttgctggacgcttccctgcctttttcttcgggttattacagcgctaccaagaatatcggtaaagtacgtaacgatggtctggaacttagtctgaacaccgtcaacttccagacacgcgccttcaagtggacgactaacttcaacatttcattcaataagaataaagtactggcattgtcggagaatcagacagccttgctgactgccgcgcaattcgaccagaactacaacggtcagtccagctacatcgccaaagtcggtctgccgatgggactgatgtatggttatgtctatgaaggtacatacaagtacgacgacttcaacaaatcgggtaactcatacagcctgaaaccgggagtgccccactactctactgagaccaacactcagccgggtatgcccaaatatgccgaccttaacggagacggagtagttgactccaacgaccgtacgattatcggacgcggacttccgatacataccggtggtttcaccaacaactttgaatataaaggcatcgatctgagcgtcttcttccagtggtcatacggcaacgatatcatgaatgccaaccgcctgttctttgaaagctccaacaaccgttcacgcgaattgaaccagttcgccagctatgccaaccgctggacaccggaaaatccgaccagtgacatccctgcggctaccaactcctcttccaaccgtgtgatctcttcacgcatcatcgaagacggttcgtacctgcgtctgaagaacgtaacagtaggctataccttccccgccaagctggtgaagaaatggaagatagacaaagcacgtgtttacgttgccgcacaaaacctgtggacatgtaccggttattccggttatgatccggaagtatctgtacgcaacagtgcgctcactcccggtctggactactcttcctatccgagagcatactctatcagcttcggtgtaagcctgggattctaaacggataatgatagtaacagttagaaaaaagaattcgattatgaaagcattaaaaataacaatcatagctctattggcaggtttcagcatggcatcctgtgactttctggacaaagaacctaccaaactgacgccggagaactacttcaacacccccgctgaagccaactccttcctgacaggcatctacgccatactgtcgcaacctactttctacggcggtgactatatgtacctcgtagccggtgacgacttatcccactacggaggcagcggacgcggtcccgcatctaccggactgatctgcaacaacgccaccaccagtgacaacgccgtgactgccttctggtatgccctctattcaggcatcaaccgtgccaatatgttcctcgaaaacatcgacaaagtaaacggtttcgatgcaggcgtcaaagaacagtacatcgccgaagcccgcttcctgcgtgcattctattatttcaatctggtagagtgctggggagatgttcctttcaaaacagtttcaacccaaagcgttaccaacctgaatatcccgcgtacggacaagcaggaaatctatgacttcatcatctccgaaatggcagatgccgccgatactggtctgaaatcggcctccgatcttgcttacaagccgggacgtatctctcagtctaccgcatggggcatactggcacgtgtatatctgttccgtgcaggcgagcattaccgtgaaggtcgcaatgccacacaggccgaaaagaaagactatttcgaaagagccagcttctatgcccagaaagtaatgactgccggtcacaaactggctgccaactactgggaccctttcatcgatatgtgttccgacaagtataacaccactgccaacgaaagcatctgggaagccgaatttgccggcaacaacacttcggatacacaagccgaaggccgtatcggtaacatcatcggactcgccggtccggatctgtcctccaaaagcgatgtgacgggagccaaagaccccggatatggctatgcctttatctacagcactccgaaactgtacaacctttatgtgaacaacggtgataccaaacgtttcaactggagtatcgctccgtttgaatacaaagaagccggaggcaagaatacaggcgttacccaccgtgaatttgagcagggcaaacttgctgaagtaatgtcccaatacggtcagcaacgcggaacttaccagtacgcagatgacacagaaaagaccacagccaccaagaacttcagccgtatgtgcggcaaataccgccgtgaatacgaagcggataagaaagacaagaactatacgtctatcaacttcccgatcctgcgctatgctgacgtactgctgatgatcgcagaagcggaaaacgaagcgaacaacggccctaccactctggcttaccagtgtatgaaggaagtaagagaacgtgccggactgaacgagcttcccgacatgacgcaggaagaattccgccagaccgtgaaagacgaacgtgccatggaactttgtttcgaatacacccgccgtttcgacctgatccgctggggtgagtatgtgaaaaatatgagagcattggtaaccgaagcacaatccggcaacaactggacgcagggacctaccaacgtatatacctacttcaacatctccagcacctacaactacttcccgattccggatgcggaaatgagtgtgaacaaagatatcacacagaacaatccgggttggtaatcacagtattcatcgataaaagtatcatagattatgaaaacatataaactcatagccatctgtatagcaagcctcttctttggggcttgcagcgacgggctggacgaagcggtaggtctgcacgtaaaagtagcgaccaacgagaatgtaagcttcgacggacagatcattactgccaaaaaaggtactccgatagagttcatcctttcgggcgatccggacttcctgacattcttcagtggagaagcgggcagcaaatacgaatatcgcgaacgcgaaacgattgatccttcacagatcaagtcgtctatgctgaacttctctatctggttccagtacggtaacccgagcacgacattggagaaacacgtatatatctccgacgcattcaccggattatacaaggataatttcgaagctgactctttgcttgtagagctatttgagaaagacggcaaatggaaagaattggttccgcagtccgcattcccgacagcggcggtaggcaataccgatctcgccactccatacagttttgatatgaaagaatacatgggcaaacggattgcaatcgctatctgctaccgtggcattgacaatacagtggcacaatccaagatgtattttgagcgaatgcgcatcaataatgtgatgacaagcggacaggaagcagaatattctgccggttctttcggttttactccgatcaatatgaagaacaaatggaatctgaaggatcagaccagcatgatcaaagaccgtgaatacgggacagttaccaataacgtatccggtatctggaacctgacaggtgtaggcggcggctccttcttcatccatagtaccaatgccaacgatccgctgaaatacagctggctggtttccgatctgattaccgttaactcttgcagccccgatcagggaacgaaagtaaaggatattacccagcgtctggataagtacacatatacctacaatcaaattggtatctacaacgtgacattcctcgctcgtaatgccaatatcgatcattcctccacgactacttaccacatggtggtaaacgtagtggaataacaataaacgaataaaataataactaatacattatatctatgaattactttaaatcaatcatgttaaccgcatttgcgctgtttgcattggcagcgtgcgatacagacgacttgagagacgatgttgacaatctgaaggaccgcgtagagtctttggaagcacaagtcagtctattgaacgataacatgacagctatcaagcgactgcttgaaggtggtcagactatcacagaagtgacgaatacagacggtacatataaactgaaactgagtaacggagaaaccatctcactgacacaaggctcgaagggagaagtagcttatcctgagattactgtcaatgacgagggtcaatgggtagtgaacggtgaagtattgatgcagaatggtacacctgttcaggctgtgggcactcccggtaaggatggtatagctcccaagttccggattacggacgagggaagtttctggcaggtaagttatgataacggaaccagctgggaagacgtactcgacacagacggtcaaaaggtttctgctgtcagcgatggttccggaggaagcagtgcagactctttctttgaggaagtatatgtagactcaaccggggagttcttcgttgtcaaactgaaaggacagacggaagccatctctatccctatcgtaaaagacttgctttgcgaaatcaccgaaccggaaaccggaatgaagaacggatactgggaaataggctatggcaagactgccactacaaccgtgaaagtgaaaggtgaaaacatcatcgttactgctcctgccggatgggtggctactgtgagcgaagcagacgaaaccactcatgtagctacattgagcattacagctccggcaagcgcaatgagtacacgtgcaacggcggataacggttccgacgtaacagtacaggttaataagggtgccagttgggcggttgccaagattcaggtgaaggcaattgaagtagttgacagttactacgaactttacaacgcaggaggaactatcgaaataaacggaatcaaaatacaaaaagatggcgcagatggatatggagaagcaaccttgattacttccgagtctgaaagcaaggaaatcagccaggcaggagtttacttcatcaaaccgggagttgaaattacgtatactgggaccggaactctcgataacctagttcttatcggagacaatgcagagcaaaaggttaaatgtattgtcagcaaacctattatcttaggaacagcaagtgccaagggagctttcattatgaatatcaacatggatgccagcacacttgccaactatgtattctcaattacaggcaatctttctcatctggcattcagtaatagcgaattttctgtgtatgaagccagaaatctggttaattgcgcagccgataatgcaggcgtatctgaaaatatttctatcattaagagcctagttaaatttaatgtgactaaagattggacagcttcacgcgtattaaacttcaccaagggactcacatgcacatctgtaacgttcgaaaacaacgtagtttatccttctacaatagaatatacgattaacggttgtatgctctttgcacaaggacagaatttggattcaaaagtgataatcagccataatacattcatcaattttatctctagttctcagtcccttgtaagagcaaacgtaaataacgatgttactttctctaacctcttattcttctataacgcaaactttggaaataagaacgccacattaatcaatgtaggagacggagctatcggaacattaacatttgcagataatattcgctataacaacggaacttctgtaatcaacctcaatccgttcggaggaaccgctgcccccggatacccaaacactgtagttcctttggcagaagccaatccgttcgacggcggcaccttcgacctcgccaacggtatcttcgttccgaatgcagaatatgccgaatacggtgcaaccaactaataccgactaacgtatgaaaaaagtaatatcaatcatatgtatcaccctcctcgtcgcactttactcgtgcgacgaacgggatgatctgcgctccgacattgacaacctgaaagaacgggtagccaatctggaagcgagcatagaacagatgaactcggacatcagcaactatcagcagatggttgaaggtaagattttggtggtgggatatagcaaggatgagcaggacaactataccatcgaactgagtaacggcgaaactgtaaccatatacagcggcaaagtagacataaacgatatgcctttgttcagcgtcaacgcgtcaggtcactgggcatataccatcaacgacatgaccaccgaactgctcgttaacgacaaaccggtaagcgccatccccgaagcgggaacagcaggcgtaaccccgaaactgaaagtagatgcaaacggtttctggctgatctctatcgacaacggaagcacctggaacaaactaggcaacaaccagattgccgacggaacacaagccgttgccaacgcaagttccctgttcagcaacgtaaccatcgacgaagcgaccggacagatcacctttaccatccgtgccgacaacagccaagtaaaagtccccatctacggaaaagacttctacctgacaatcaagtatgaaggcacagccactttcggtctgggacaaaagcaggaattccttgtagaacaagccaatgtggaaacagccaccatcgaaaaccagacatggggcgtgaaactgacggaaaacaaactgatcgtcaccgccccaaagacaaacgtgcaagggaaagaatacgaagaacagatatacatcaagatattctcgaaagaaggctactgccgggtagtgaaacttccggtaaaactgctgaccacggagatagatgccaactcggctttagcctggcaacgcttcaggcagggagaggacaatgtgctgctcgactattcgtatgccggatataatcatggagaaagtgcgccgcaaggcgcattttctttaggataccaagtgatcaacgtaaaagagcgcatgaccgcaaagaacatgaccgcccgtgaagcgctgatcagcatcctgcaagagaaaggtatgacaagagtaaacggaaccaacaagctgaacgccaacgcgaagattgtaatctatttccccgcaggcgattacgttctccacaacgacgatgacaacacccgcgacgaaagcaagcagaaggatgccgttgactcgaaaaacaacaatgtcagcagtggcattgaaatctatggcggtaactttgtgatcaaaggcgacggtcccgacaagacgcgtctgatcatggaaacgcctaatctgccgacaagtatcagtaacctcagttcatcacctatactgttggcaatcaagcacaccaacggtccgaacaatgccggtaactcccccaagctcgcttccgtaaccgagaatgccaagcgcggagactttaccgtgaaagtcagcggaaccaccggaatctcctccggacagtgggtacagttgcgcttgcgcagcggagacagggaactggtaaagaaagagatcggtccgattgccctcaacgagaactgggcgatagcgaaagcccctatctccatcaaccaaagctccgacgacctgtatggcgtcaaaatcaccgagtttcatcaggtgaaatccgcctcaaacggcaagatcactttctacgaaccgatcatgcacgacatcgacatcaagtataacgatacggaaggatgggaaatccgtacgtacaaatatctggagaatgtcggtgtagaagacctcagcttcgtaggaaacgcattggacggctacgcccatcacggagaaggacacgccgaacaggctaaagtaggctggcaatatgacggagcctacaaaccgctgctgctgcaacgtgtagtcaattcatgggtacgcaacgtccacttcgagagtgtcagcgaagcgcttacttttgccgaatctgccaacagctcggcatacgatatccgtatcagtggaaaacgcggacattcagccgtacgttcgcaaggttcttcacgcgtctttatcggcaaagtccgcgatgaaagcgcaggaaatgacgtatacggaaagagttgtcaagggcagttccacggttgcggcgtatcgaagccaagtgtaggaaccgtattatggaacgtaacctggggcaatgacgcctgtttcgaatcccacgccacacagccccgtgccacgctgatagacaattgcagcggcggacttgtatactaccgcgcaggaggcgatgaaaatgaagtccccaatcacctgggcgacctcaccctgtggaatctgaatgtgaccggaacggattctcacgcttctaacttcgcatggtggagcgacagcgatacatggtggaagattttcccgcctatcgtagtcggtacacatggtatgaacgtgaaattctccggtaaagagcagcaacaagtcacatatgaagaaagtaccggtatgaaggtatcccccgaatctttgtacgaggcacaattgcgggaacgtctgggctatgtacccggatggctcaacgcacttaaataacaaccaatcacacgcacgatttttctaaccttcagttaaaaacgtatatgaaaatcagactttaatcaatttaacacccaaaagagaggggccgggaggttcctctcttttacttttccgtatatctacaggaaataagaagttttttaagtacttttgtaaatcaataatatacgcagtatgaaagcagaccaccctgaagatatagaagatatagaagatataaaggaactcatagcccaaactgaaaatgaacaagtggaatttaaagaaaccaccggacaattggaacgtggcatggaaacgctttgtgcttttcttaacggagaaggcggaacggtcttattcggcattacagacaaaggcaagataatcgggcaagaggttgccgatgtaaccaaaaggagcattgcggaggctatcaacagattagagccaacagcaaacgtacacgtcttttatattccccttccagacagtagtaagaaaataatagcactccatgttgaaaattcaagagacaaccgcccattttgctataaaagtcgtccttattatcgtgtagaaagtgtaacatccgccatgccacaagcagtgtataatcaattgctgataattcgcgacgaggcaaaatatcgttgggaactgtttgaaaaccctaaactctctttgcaggatatggatgaaaatgaaattctgaaaacggtaagactcggaatagaatgtggtcgtttgccagagaacacaggaaacaacctctccattattctagaaaaatttgggttactagtgaatggcgtattaaacaatgctgccgctgtactgtttgccaaccgggaactgatagaatatccgcaatgtcttttaaggctggcgcgtttcaaaggaacagataaaatggtctttatggataatcagcgcgtacaaggtaatctgttccaattgcttgattcagcaatgacctttatattcaagcacctttctttgtcgggcacaaccgaagctttggagcgggaagaacatttgacgattccttataaagctatacgagaagggattatcaattcactttgccatagacaattccggactccaggcggctctgtaggaatagctatttatgatgaccgtgtggaaattgaaaatcctggaacattccctcatggctgggatatggaaaggatgaaatccgaacattgttcagaacctcggaatcctttaattgccaatgtcctctataagcgcaagttattggaaaactggggacgtggtatcagcttaatgacagaagaatgtcgaaaagccaatttaccggaaccggaatttaagttggctaatggttttgtgatacttgttttccgatacgggacaaataaccacacaagcaccatgcaagtaccacataagcaccacataagtaccatacaagttcagtccctattgaatataatggaatataacacctattccgttaaggaaatgatggagcttttaaaattgaaaaaccgtagctatttttcaaaagaatacttaaagcctgctgttgaaacaggagttatagagccaattttccctgaccagcctaaaagccctaaacagaagtatcggctgacagaaaaaggaaaagctttattagagaaaagataacgaataacgaatagcaaattaaaagatatgcaagatacactacccatccattttgctccgctgcaaggttacaccgaagcaatttaccgcaatgcacatgacgccttcttcggcggtgtagacacctattatactccgttcgtacgattggaaaaagggaacttccgtcgcagagatgtccggggaatcgaacctgagaacaatggggtgccccacctgattcctcagttgatagcctcatcggcagagaaagcagaagtgattttatcccttttcatcgaaaaaggatatcaggaagtggatataaacctaggctgtccgttcccgcttctggcgaaacgtcataacggctccggcatccttccttatcccgaagaggtgaaagcattgctcagcattgtcacccgatatccgcaaatcagcttctccgtcaaaatgagactgggatgggaacagtcggatgaatgcctggcactcgcccccatactcaatgacctgcctctgcgccagatcaccatgcacccccgtctgggcaaacaaggttacaaaggagaagttgacttgcaaggattttcagctttccgggaggtctgccgacttccgcttgtttacaatggagacattcataatttggaagatattcaacgcatcagcacacaattcccctcactggcgggaatcatgataggacgcggactactggcaaatccggctttagcactggaatacaaagaaaatcgtacgctcgcgcccgatgaaatgagggatagactgaaatccatgcacaaaagcgtgtacaacaattacgacgtactattggaaggaggagagggacagctactgactaaaatgaagaccttttgggaatacctggcgccccaaaccgacagaaaagtactgaaagcgattcataaaagtacgaatatcagcaaatattatcaggctgtcagtgccttttttaatcaacggtaggctgcccgattttgaaataatgatttgctaaccattctcatcactggaaagtattctaaataaagcatctattcttcaatatttcactgtacctttgaaaacttgaaaccaaatgatacaaatatggcgaagattaaagtgcagaatacggagattacggtcgttgcatataacgacaacgattatatttcactaactgatatggctcgtagtcagatgcaagagcatatcatttttcgatggcttagtttgaaaagcacccttgagtatatcggggaatgggaaatgttgtacaatccaagttttaattgtaccgaattcggtacaattaaaaatatggcatgaacagaaccccgaactgaaaggcaacattcgtgactatgcctctatcaatgaactgatttgtctttctaacatggagaacttgaatgctgtgtttattgaccaaggcattccacaaggtgagcgactcatcaagttaaaccaaatagccattcagcaaatgcgtatattggaggatgatgggaagagaaaattgttaaagtaggattgactttcagtccgaatcatttagcaccattcctctcttttttattcgtttattccatagattttccgtaattttgcgcccgtttattaacaagcacattatgaaaaaatacattctattatctctctgcttgatgacactatcaagtagtttcgcacaattaaaggattttaaattcaaattctacggacagattcgcacggacttctactataacagccgtgccaacgaggaaactgtagacggattgttctacatgtatcccaaagatgaagtgctcgacggcaatggtgaagacctgaacgctacatcgaacagtaatttctatacattatattcccgtttgggactggatgtggcaggtccgaagttgggaacagccaagacatccgccaaagtggaagtggacttccgcgggtcgggaacttcttactccaccattcgtctgcgccatgcatactttaacctggactggggaaagtcggctgtactggtaggtcagacatggcatccgttgttcggtgatgtttctcctcagattcttaatctttccgtaggagcaccgttccagccgttcagccgtgcaccgcagattcgttatcgcttcaacaataaacaccttcagttgaccggagcgttggtatggcagtctcagtatctgtcacaaggacctgccggtaaaagtcaggaatacataaagaagagcaacatccctgagatttatgtcggagcagattacaaaaacggaggatttctggcgggtgccggcatcgaaatgatttcattaaagccacgtactcaatcttcatgggaagaaaagacgtttgatccgaccaccaatggtactatatcaatcccacatacgtacaaagtagacgaacgtatcactaccctctcttatgaggctcatgtaaaatataccaataaaaattggttcatcggcgccaagagcgtattaggttccaacctgacacaagcatccggtttgggaggatttggaattaagcacatagacaacaagacaaaagagcaggaatacactccgatacgcttctccagttcctggctgaatgtggtctacggacagaaatggaaaccgggaatctttgtaggatacgccaaaaacttaggaacaagcgacgaattagtctctgaaaaactctatggaacaggaaccaacctcgataaactggtaactgccggagctgaacttacctacaacgttcctcactggaagttcggagttgagtatacattgagttcggcatggtacggcaagctggataaatcggatggtaaaatcatagacacccactccgtcagcaacaaccgtattgtagcagtcgctatgttcatgttctaatttgcagaagatcattcaacagaatttaagttcctacatcattttaaggccgactaaaaagtcggtggtatcttaaatctcctccttcgggaagggaattaatgatactattgacttattagtcagtctcaatttgtttcaaaaagtttcagacgcttgaaacttttagtttcaaaggttgaaaccattggtttcattacttgaaactaaaggtttcaaggcatgaaaccaaaagtttcgccccatgaaacaatcaggagaaatactcgattcggatgatttgaccgcccgatccgattaactcaaccgtatcagttgtttcaattgacctgttcttttaggaagcattaaatcatttattagtcaataatggatgatctctcagtcattaatagctgatttctcaattattaatggctgagagatcaaacgttaacagttgagaaatcagctattaacatcctgtaagtcaaaagataacattgtagaaatgagacagatcaggatgaggcagagtgagagcaaccgtttgccctcatacctgccaccaccgttgctaccacaccgaaaaccacgatgaataaagggatacagaccttttgttagagcatgagagcaaaacggctatcaaatcactgtggagagcctgaccgatatgtaggctcctcagctttcattgctgctattacagcagattcctttggccgtaaatgctctggggggatctgattattcagatagcataccacagaacaaaagattatttctccagttctacctcatagctggctccatccttacagaggaagcggagtaccgtttgttttttatcctcggataccactttgcagaaaggagtctccgctaccttccacctgcctttcagagtcaccgtcacaggaatctcaccgctttcattgtcaatccacgggcgggaatagatgctgcgttccatacgttttccgtctttatcgaaagcttcatcactcggaccacgatacaatgccagatccggttgagctacagtcaataatactttatcagcagattccttacggaccatcactaagcaggacgtatccgtacgctgcaacaatccaccgggaagcagtgactggggagtttcaaaaagcacataagaagttatcctgtccgaaggcgattcaaggatatgtgcattccggtcttgctgtaatacgctgtaggcaggtttctttgcaaaggcagtcatcgtcttccggtcggttcccggcagaatggcatattcgtagcttcccgctttcggtgctttcccatggtcgataatcaatgatacccagtctcctttcgtttctttgcctgtatcctgcatacgggagtattgcggaaagtttttctcgaatcttgcagcaaccggcacataatatccggtacccagatgatccatccatacttttccttcacccgcattattcttccaatagtcatgtgccgctttatctgtcaccgccagttggaagatggtcgtctccgttggataatccgtgtttgtattctcgatatccgagcccagacaaacgatcattccatcgatgaaatggtaggattttcgcgcacgatgcgttccgttatacttatcgtgttcgtgcagcttcattccgaagttgccattcatctttccttgtgacaggccgccggcaaaggcttcatccgaataaagcatctcttccattccggagaatgtatctacattcagcacgttggctttgagcaggtccagcgggagatggatggaagtcactcccggaatgcggttccagtcgaaaccttcctgctgccatccgctggtggcgggagtcactgtctgtcccggaggtgctgtcagtatctggagacttccatgtgccagataacgtccatagaggttgtgtcccagataatgttcggctgcccaaaggtagcgtgaatgtccgcgtgccacggccgaccagttttcacgccgttgcacggatacacagccatagcccagcgagagattgccctgcggatcgggttcggcacgaaaaccgttctccaccaatcgtttggcaatcttacgctcctgagcgttcgaaactttcggcatatattccggtgcctgttccgcagaagaggaatcggaagatacgagacgcaggtaggcggatgccatctctttatcaaaatcgccctttccatcgggagttccggcaattgccatcatcgcatagtgcatgggaactaatttcccctttccatcgggatgacgcccggacatagacaagggaaagttcagtttattgcagtagaaacgcatggcaagcaggacatctttgactgtccggtgtgccaattcggaaacggcaaggcttgtccgactgaaaagatatatcatattcgttgccccgtccagtcctccaacggcataggcagggtagttattacggtgatggaaagctcctccgtccactttgaaagaaccggccagtcccggtgcaggacggcagccgtagtcaatccatcgggagaaggatttcaagtattgcagcttctccggcgtgtcttccatcatcagaatgcttgcgatacgcccggtggtttgtgtattgaaagaatccatgtcgattccgttgccttccggcttgggatatacttcgttggtgatggcataccagcgcaatgtccgctccgcttcgagcagttttccttcttcccgcaatacatctttcatcaggaaataagccggataaagtccgcgcacgctatatccgtaatgatgaatattgccccagcaactaccgtaagccactccctgatcggtgatatggtcgtacatcgcaaggaatttccgcctcatctcctcgcggatcggtgatcctgcctcactgttattgtaagccacggcaatccgtttcatcaagtcaaaataggcacgcatctctattcccatcttggtcagcatatccttgtcccagtccggaatcatccgttcgtaggcttcggaagcgcgcaccatgaaaacgggcactccggacacttgcccgtccttataggttatctgatagaggtcgtatttcttacggatggtttcggcttctttctccgtcaccttccctttggtatagatcatgtcacggaaacgcttttccagcagtttcatttcctgccgctgcttgtcgcttacgggagtcagttcgatgtccggtttcaggagggagtgtttgtagagtaccagccagtgattggtagtgccggcattgacaaagggaacttgcagatcggctgtctgctgacgggcgtctacctttgtcgcagtgatcagatgatcgatgaaaaggcgtccttttgcattaggagccacgatgcggagctcgttcattccttcttccggcgtgccttgcatatcgcgttcatagcagacccatgccgcacgccagcctttgaaattgatgccgaaagggaaagaagcgcacttacggccgtctttcagaaattcaaactcgatagcagcgtcctgaggctgctcattgtatatccatacgatgaaagcggaaagatacagatctttccctgtcgggtccttcttttcaaacttcaggtctttccggagttccagtctcccgttcggttcgaaggtccattccaacgaatgttttccgtctttataatgtgcaccggatatgcccaaccgagactgaacaccggttatacaggcaggcaactgcggctcttcaaaagagaacatccgctcgtccgtaactatctgcgcattgaggaatgccggacagagaaaagacaatatcagcattgtcactgacagagtaaaagattgctttatcatagaatatattgttttaggtccgatggtaaatcggtttatcattagccggtatttacagagagagagcacttgttcttctcccgaatgcaaagaaacccctcttttgttggaaagaggggttcaaatcgtacaaaatagttcaaattatgtgctatatcttatagataatgaccgatatgctctctgccggtcctgcctttaagggtgaagttctttaaaagccgcattctcttcctgcacgtgctgaatggtttgtttcagctctgcaatcggcaaatcatatccataccagccggtataacaatctactacataccattttccatcgggcagcaattcgaactccacacgtaagtcgatctccgattcttcgtatcccgcctcaaataccttatgcgccggttcgttcagcgtaaacttagatacataaacaccgccctcttcctgagtgatacgttcttctttcagcgtttcactgtccagcaacggccacttttccttcgtaaaagggaacgttttctcagtttccccgtcatccgccaataaagtaaccggcgttttcaacggaaacttgacacgagtatactgaaacgccgcactggaagtaaacttatccagaaacgacttgaaatcttctcctgtctgtgctgcttcactttctactttcgccctggagctattgccacaggaaataaatgaaatacctgccagcaatgacatgaccatcaaacagcatgcaaacttcttagctctcataacacgatataaattaagagtttaaaataacgctgcaaagataatgacaagttcaatatcttgatacgaatcgggaagaaaatagttaaactactacaaataataaacttaccacacctcattattccggtattaaaatacctttgtcataaatcgaaatactaacttaaataaaaacacaccatgagacccccctactgttttctcctgataggtcttttgcttttatgcagtacacagactatcgctttcgcccaatccggcacttatcagacaattcccgaatctttgcgaggctactggcaatttaaagcagacaatgtgtctgactggaacggtccgctcatcggagagaatttcgtagagaactattatgtcgttttttatgccgaacagataaaacaggaagctgacggcagctacttcttccatttacgcaatcagaaaggagatacgacggaattccgtatcacacctaccggcaatgacgccgccaccatctggtacaaaggctggaaagagccgaagaactgtatccgcaagcaagtccccgaccacacggaaccgctcactccccttacattgcccgaccgtgtttatcagaaatgggtgaaaggattatccggaaaagtaatctacgaattcacccgtgacggaaaactgctctatgacggaaaaacatgggatatcttatcggccggatattttctcaataaagaatatcggctgctcgtcaaaagcggagaatcatacaaactgctttacctcagcttccccctgccgaaaacaatgaacgtagccgctgaactgcaaaatgaaaaagtctctcccatcgcctcacaccctgaaatatatgctttcgccggatgttggatcaatcaagcaaccggggactggcgcatcggattcttcgaagactttgctgtctaccaatgtcaattttgggattatgagtcgataaacacccaaaagaatcagaccaccatcatcctgaaaaatggaacagaacaactgaaagtacgtttaactcgtaaagatgaaacatcctgcaccctgtctgtcggaaaagaaaaggcacagacatatgttctttgtaacgacaaatatctacccgattatccggtagctgataccactcctttcgtagacaatggttatcaaacggatagcgtgactctcatcggatacctgcgtaacctgccttcgacacgtcctttcgaagtagacgtaccggatatgatcaccaataatgaagaagaatatacaaccgaaatcgactcacttggaaggttcaccctccgtttccctgtattgaacagccacaacgtgttcatcgattggggacgtaccactatctgtacatccgtagagccgggagagacctatttcctctatgtggacttcgctgacaaaaagaaattagtgatgggagaaaaggcacgtatcctcaacgaactgctggcccacgaaggactcagtgaatatatcggctacgacgaaggagaaaaaatggaaaatatggaatatttgcaaaagacgcaggatatcatccgtcataaatcagaatatcgtgcaaagatgctcaatgatcatccgcttctctcgcacaagttccgctattacacagaacaggaaatccgctacaacgccgcacgtgacctgatgcaacgtcgcttttcggtagaccgtaacaaacaggaacatctgcaaccagaatttatgagttatgtagactccgcactatatccccgtccggtagagccttatacgcttctcagagattatggttctttcctgcgggattacgtcggatacataacggacattgctcccgcttcttcgaacaggttgaccgtgactcctcaaaagatggaaatgctctatctcaaatttgaaagggatggaaagattcagctatcacaagaagaaaaagacgcattacacgccttcagtaacttcgaacaagaaattgaaaaaatgaaagctgcgaatacggctgactcactgacaatggctgcctacagcaaaaagatggaaccgagcatcaaaacaatacagagcctcgtagacagagacgaaattctcaatgaatatatgatgggaaacttactcgctaactccatcaatcgtacccttgctatcatcgattccctgcaaatggacgcaaaattaaaggaaatactaaagacgaattgctattatgagatgttgcagcagactcacaaagaattgccggacagcctcatcagtaaattcaaagcagaagtttctaatccttccctacaggcttatgtattaaaccaacaagggatatacgaagaaatatcccataaggccatcgaatatcccgaaagcctgatgcctaacgaacctctggcagagatcacagacggagaacaattattccgcaaaatcattgagccttataaagggaaagtggtttatctggatgtatggggcacctggtgcggtccgtgcaaggacatgatgcaatatgcaggaagcgccaagaaactgtttgagggaaaagacgtgatattcttatatctctgcaaccattcctcagacaaatcgtggaaaaacattatcaaggaatatggactgaccggcaaaattgccgtccactataacctgcccgatgagcagcaaagggctattgagaagttcctgcaggttcgctccttccccacctatatgttgatagacaaggaaggaaacatcgtaaaccgtgacgcccccagacccaacagggaaaatgatcttctcaatgcagtctataagttattagagaaataaacgactcatttcttccgcaaatactcgtatccgaaacggcaaaagagacatttccgtttatcacaatactctttgcggagctgtatcaatgcctggctatctgccgccgaaccgaccggtagcccggcatcttcccacgaccggataatatgattattctccgctttcaactcttccagaaaacgtccggcacgatcacacatccgctcatcggttctatgcagaccataagcatataagaaaggaacaacggtattaatcacaatcaagtcctgtgacctctctcccatcgatttctctttttgcgaagaaggccggccgaatatataatgattatcccaataagcagaagcatgagtagacagtagttgacgcacttccggcaaggtttctgcctccatcatctgcgaaaaaagcttatcaactttctgatacaagtaggccaactgtgctaaccgaatatgggggaagttttccggacgaagcctcaaaaaacgccataaaccggcatccatcacctgagttatttcaaacttccgttgcagatagcgaaattctttacgaagccggagactatactcatcttcctgctccttctttaaaaacgcctcctccagcaaaccggcctgcccgaagaaaaaagcctctatctgaaacagatcattccgatgcttgtctatcgcccggaacggaagcagtcctgcccacgtctcaaaagcatcgccattcaagccgaaaccgaaattacgggcaagagtgataaagaaagcatcttcccaatgacggtcacatcgttccagccgttcggtaatttgccttgccttttgctccagtcgttcggtctgaagggctgtcagccaggagtgaatcgttaatttggataaagagctgatgatggaatagcaggcaggatattggtcggcaatgcagagttcatgataatgggtttgtacattctcgggacaggtcaatagcagttgggggatttgctcaccgttggaacgggttacttcggcgtctgcctcggccaccacatgcagaatcacagaatcgtatgttttatcatggtcgtgaccgtgacggtaccagtctgaagaatgagtatgtatctctatatttcccacccacaatgtaccgtctatcttcagcttcgcattaaaaaagtcgggaccggcatcagggttctgcagtccggaatcgataatttctaccagtaagcctttggtggtttgcagtattttgagagggaataatttatgtttccacacatagtggagaaggtgttccatgttaacagaaagttaatgtgcactgcaaatgtaataaaaatcttatctttgcgactattattttgaatataagtcagaaaacaatgaaaatagcgttgatcggttatggaaaaatgggcaaggaacttgaaaaggcagcccttagtcgcggacacgaaattgtctgcattattgatgttgataatcaggaagactttgagtcggaagcattcaagtccgccgacgtagccattgagttcaccaatccgatggtagcctacagcaattatatgaaagctttcaaagccggagtcaaattagtatcaggcagtacaggatggatggcggaacatggcgaagaaatcaaaaagctatgtaccgaaggaggaaaaacccttttctggtcgtccaacttcagccttggagtagctatcttctcatctgtcaacaagtatctggcaaaaataatgaatcaattccccggttatgacgtcaccatgagcgagacgcatcatatccataaactggatgcacccagcggcactgccatcacactggctgaaggtatactggaaaacatggaccgcaaagacaaatgggtaaaaggaacgctccttgcaccggacggtaccgtcagcggcaccgacgcctgcgcttccaacgagtttcctatcgactcgatccgtgaaggagaggttttcggcatccataccatccgctacgagtcagaagtagacagcatttccatcacgcacgatgccaagaatcgcggcggctttgtattgggagccatccttgctgccgaatacacggcccaacatgagggatatctgggcatgagtgatttattcccattcttaaacgaataaggcttcaaagccactatcaaacgaatatagattatgagacaagccacacgcacacaatggatcaaatgcaccattgctattctcctttatctcgccttcctcatctgggtacgcagttggtgggggctgattgtcgttcctttcatcttcgatatttatatcaccaagaaaataccctggtcattctggaagaaatcgaagaatcctaccgttcgtaatgttatgagttgggtagatgccattgtctttgcattggttgctgtctactttgtcaatatctacattttccaaaactatcagattccttcctcgtctttggaaaagtcattgctggtaggcgacttcctgtacgtcagtaagatgagctacgggccacgtgtgccgaatacgccgctttccatgccgttggcgcaacatacgctgcctattttaaataccaaatcatatatcgaatggcctcagtggaaatataaaagagttcccgggttcggaaaagtgaaactcaatgatattgttgtcttcaactttcctgccggtgatacggtagcgctcaacaatcagcaaacagatttctactctatagcttacggtgaaggtcagcgcctgtatcccaagcagatagagatggacagtctgacacgccagcagcaacgtgctgtttacgatttgtattataatgccggtcgccagcagattctatcgaatccgcgtgtttacggagaggtcgtttatcgtccggtagaccgccgtgaaaactatgtaaaacgctgtgtcggtctgcccggagatacgctgcagatcgtagacggtcaggtcatgattgacggcaaggctatcgagaatcccgaaaatctgcagttcaactacttcgtacagaccacaggcccgtatatcacggaagatatgttccgtgaattaggcatcagcaaggcagaccagacattgtatgatgattcttcatgggaagaaaccttcagacagatcggactggacaatcggaatgcacaaggaaagatggctcctatttatcatcttccgctgacgaagaaaatgtacgaaacattgtccggcaacaaaaagctcatcagcaagatcgtcatggaaccggaagagtatgccggacagatgtacccgctcaacttacataccaaatggaaccgtaacaactacggtccgatctggattcccgccaaaggtgctactatcactctgactgaagataacctgcctatctacgaacgttgtattgtcgcttacgaaggtaataagctggagatcaagccggacggtatttatatcaacggcgagaaaaccgatcaatatacctttaagatggactattactggatgatgggcgacaaccgccacaattctgcggactcccgctattggggatttgttcctgaagaccatgtagtaggtaaacctatcgttgtatggctgtcacttgacaaagatcgcggatggtttgacggaaaaatccgttggaaccgcctcttcaagtgggtagactgataaggatacagacgtgatagagtgataaggtgatagaaattgatgaacattcgtaaattcaaatggatattcgcattcgccggagcaatagccgtcgtgcttctgctccggggattcgcttttacatcctgccttatcccttccaccggtatggagaattcactttttcagggtgaacgtattctggtcaacaaatggagctacggcctgcgggttccgctgatgtcactgttctcatatcaccgttggtgcgagcgatctgtccggcaacaagatgttgtagtctttaataatcccgccgccatcgggcaaccgactattgaccgaagagaaatctatatcagccgttgtatcggtactcccggtgataccctgcttgtcgattcccttttctccgtatcctctcccgaagcgcaattcaatccggataagaagagactctactcctatcccgctactaaagagcagttgatcacttcgcttatgcaaaccctttccatcaccaatgacggactgatgggaagcaatgacagcactcatgtccgcagtttcagccgctatgaatattacttactggaacaagcgatcagcgatcagaactggattcagcctttgacggaaaagagcgaaaaagagcttaaaccgctcatcgttcccggcaaagggaaagcactacgagtatatccgtggaatatcacattgctgcgaaataccctcgtgatgcacgaaggcaaacaggcggaaataaagaatgatacgctttatatcgacggaaaacccacacagcattgtttttttaccaaagattactactggatggcttccaacaatagtgtcaatctgtccgattcacgtctgttcggattcgttccgcaagaccatattatcgggaaagcatcactaatctggttctctaaagaaaaaggaacgggaatctttgacggataccgatggaatcgcttcttccagtctgtaaaataattcacatgcatagttttcaacataacatctgtacataaaataatgagaatagcttatttatcttctgcctaccttgctccagtagaatattataccaaactattggaatatgataaaatatatgtcgaacaacacgatcattatataaagcaaacctatcgcaaccgttgtacgattgccggacctgacggcgaactggcactctccattccaaccgtcaaaccggatacgctgaaatgtccgatgaaggatatacgtatttccgatcacggtaactggcgccatctgcattggaatgccatcgaatcagcctacaacagtactccttactttgaatattacaaagacgacttccgccctttctacgaaaagaaatacgagtttttagccgatttcaacgaggaactctgccagctggtctgtaagttgatagacattcaaccctgcattgaacgaacttcagaatataaaacggaattcacaacagaagaaacagatttccgcgagattattcatcctaagaaagatttccagatagctgatccagaatttgttccgcatccctattaccaagtctttgattccaaactcggttttctccctaatctgagtattattgacctgcttttcaatatgggaccagagagtttgttggtattaacaagtaaataacattataatagccagacaaagacatcaaacgtcctgacactacgtatcttatcatatatcccggtaaggttaacaggcggacaagccttgattaatatcttttgtccgcttcctgttttcgttccacgtacgtaaaccgttgggactgcgtacgtgatcccatcggttcacgtacatgaactcatgggattacagacgtgaaacgaagaaatgtaacgaccgtaatacattaatctaacgttgaaaacagcttaataaacgtagcacaaactattaaatgaaccggcttacctgaactaggaaggcagaatctcttatgaaggtgacaatagaaaagcgatttttctctattatcaccctattgtcaccacctattatcacccttatcacgctaaattccagcacattaagtctggaaagtgacaagtgacaataagaataacgtttttaactctgtagaaagagacaaattataatcaccaggtcactattatttccttcaacagattactcttcattcagtcgattcagtaaatatctgacattctcaagatgtaaatgattgacccggtacatctgtttatattgccaactatttttagtagtatcgataatacaatctataaaagagcccattatattggcactttgcatacgattggtatttgaaacctgcatattcatcatatgcataccaaatcctttaatcacatcttttacactaattttcttaaaatgatgaactgcctcgaaggctgctacattaccaaaaagaacattctctaaatcttccagtctttgccgatccgagcgttccaccaaataactggctggatttataaaacgattgagcgtaagataaaaggtcatcatttcatgatctgaagaaaaaatggcatgcatgaattgtgttgcgtcccccggacaaacaatctgctggttgtttaaaacctccttcataagaatttaaattaaatggtgaataaattaagttcaacggggctaaacagaaaggtggttttagataataaaagaagcggttccgcctgtcccattgctcttttctcgttcacacaaggcagcaggtgcattaacactctacatgggggtgcgaaaccgcccatatagaatgaaccggacaggcataaaaatgcctgccacaattacaaggcaggtttccagccttgtgtgattttgaaaaaagagcactacaaagataggacataaatcagaataggaaaaagaaattcattctaaattgcatataccacagtaaaatgcaaggtataagccttatttctaatcacaagccaaactcgtttcaaagaaaaaggagaatgttgtgactctctcttttataagataacaacattctcccagcaatctgttttaccgggggaggaccccagttttaccaaacggatacctatctcaactcaaatggtacaattcctttaatgtctctggatgatgttccgatgactgcttcaaacttacccggttctgccatccactcgtgtttgacatcatcgaagaagctcagggcttttttatcaatcgtcagcgttacagccttctcctcacccggagccagttttactttcttgaagcctttcagttccttgaccggacgaggcagagaggatttcttatcgctgacataaagctggataacttcctgaccttcacgagtacctgtattctttacgttgatcgtgaaagagatggtatcatcggcagtcatcacctttttgtcagccgaaggtttcccgtaagcgaaagtagtatagctcaatccgtgtccgaacgggaaaagcggtttgatcttttctttgtctgcccagcgatagcctacaaaaatatcttcacgatagatttcgtttatggtatcaccattgttcttggagtgtgccagttcttctttattccccggatattcacccagtgtatgtgcgcctacgtcttccagtcttgcaggaaaagtaaaaggaagtttccccgacggattagcatctcctagcagtaccgaagcaagagctgttccggcttccgaacctaagaaccaaccctgaacaatagcgggcacttcatttacccaaggcatggcaaccgcattaccggagatgtttacgacaatcaagttcttatttacttttgccaactcgccaatcactctgtcctgcgcatacggcaatccaagggatgcacggtccgaatcttcgcaatcctgatgattgctcttgttcagtccaccgaagaaaattacgtaatccgcatctttagacacttctacagcctcagcaagaagttcatcctccgaacggtcgtctttcaaatcttgtccggtctgtactccattatattcccctgtcgggtcaccaacgtatccacgggcatacaaaacttccgcctgtgaacctacgcggttcttcaagccgtccaaaggagatatctcatatttcactttcagagaagaactgccaccgcctacagtcatcatcttaatggcgttttcaccgataacagcaatcttcctggctttcttcaagtcaataggcaatacattatccttattctgtaacagtacaattccttcttcaccgattttgcgtccggcttgtccatgctcgggcgaagccagagaaccgaaaggtttatacgggttcatcgaagtgcggaagatcagacggaggatattactcactttttcgtccagttctttggttccgactgtgccgtcctggatcagtttcaggtaaggatgtgccaaatagtaattgtcataagcattccttgtcccggcagaaagtccgtttgtccatgaaccgaactccatatccagaccattcgaaatggcctggaaagtatcatgtactccgccccaatctgaaacgacgacaccatcaaagccccattccttacgcagaatatcttgcagcaatcgcttattatggcacgcatgctgagtcttatagagcttaccggagtcggtatcttcactaaacgaataaaggttgtaagctcccattattgcccaagcaccaccttcctgaacggccgctttgaaagccggaagataaatctcataaagagcacggtcgctcaaatgaacattggtggtgtgacggttgaactcctgattgtttaatgcgtaatgcttcacacaagcagcaacaccgttttcctgtactcccttaatataaggaactaccatcatggaagacaggtacggatcttcgcccatatattcaaaattacgcccattcaacggggtgcggtagatgttgacaccgggccccaggagaatatcttttttccggtaacgggcttcttcgccaatgctcttcccataaaggtaagacatttcgggattccatgttgcagaaaggcaagtcaatgcaggataggctatacaggaatcgtttgtccatcctgcctgatcccactcatcccataatacttcgggacggatgccgtgaggaccatcggttgcccatacttcgggaatccccagacgagggactcccggtgaactaaatttagactgcgcatgagtcatcttcaccttctcttcaagtgtcatacggctcagcgcatctttcacccgttcttcgataggcttgctcgtgtccagatatactggtgtctgcgccatattcatagtcggtaaaacggcggctatagacaagccaagtaacgttgctttaaatttcatgttcataaatgatttctgtatttttacttcttcacaacagaaagaattcctttatctatcccctgagtgaaatctaacgtaaacacataagtaactccctgttccaacggagaggccaatacaagattttcctcatcaacattgaataagttccgggtagcctgatccatttgcaggttcttttgatgaaattgctgatcccaagactttccacccagatatttaacactgatataatcgtatcgtatgcgttcaccaataaccgtactgccttcagcaccagtcttcccagtaaactgataaactttcggactgatttccgccacacaataagcagtcgaaaagtcccagttaaattcgtccttaatagacggagagcccataccatagcccaacaaccatacggcaccatgcccgtcagcatccagtccggcttcactattgccattcatacgtactactgcaaagtatttgcgtgtagcatttaccatcaccctgtagctaccggcaaccggcaagaacttcaagtgattatctccggtcttcaccagataatccggatcaacataccaatcatttagatcttcgatgccacctatttcgagtgtctggttctgcgtcaaagacatctgcaattgatacatatcggaactgccttcttccagcttcattccattgattgtaatgtccggtcgcggcaagtctacctgtcctactttctctacagtcagtactgctttggtattacctttcgttacatctaccgtaaacttataaacaccgcctctctcaaatttctgcccttcctgcaacttcaagttacccgactctgttatttcaacaaggtcgcttgtagtagagatggcatctcccttaaattcaccattatcccacttgtttatgtggaagaatttaaagtcaatatcacttgttttcatagtcacaccggcagtaaacgtaagctgatacttctttgccgtaagttgcggcatacacaaaccattctccggcgtccatcccacttcgtacaaagataccgacggcttgccaattccatttccgatagcccagatagctcctgttccgtcatcctgcaatttagctgcttcaccgtcttttaaagctatgacagagaagtactgtctcttaccgtttgctgtaatctgatagcttccgtcaatcggcaggaacttcagtgttccatcctcctgcttttcaaagaagtccggatcaatccaccattcatcataagcaggcactccttcgaacgtcagaatgtcattctgctttaacgacagtttaacagcatatacatcgttttctaccagttccatttcttttccgttcagcaataatttggcaaacggactcgcttcatagttgaaagtattaaactgaatcgtataattgcccggctctgtattggagaacgggatagacgtagtagagcctactgcaatcgtattgtcttcccagccaaaagttagctcgttaccgtgctcccctactttcggagttttgatatacgccttcatcttctgcgaaaagtctcccgatacgctataatgatacatcgattgcctgtccatccggtactcctgcccttcttcatctaccagggtcagataaggaaagtccgggcgtgccaacgtaagttccgtttcctgttccgtcgtagtaaagtgaatattctgaaggatatacttcaatgtcgcctttccgttaggaatattagcataataaggaatataaatctttccggtatagtcgcttccacttgtctttgttcggatcaccgtttcagatacctgttcttctccatagaaaagctgcgctttcaaagtagaaagaggaacgtctacatccgaagccttgatcgtaaacggaaggctgtcgccgaaaagggcatccgcattctccgccttgatctccatactcggattaccgggaaggaactcgtcatcattacaggaattcatggataagattcccgccaatgccaatgttatatagatactttttttcattgtctttatacttttaaggttcttactttgactttgcccaacggtatgaagttactgatttaccgggaacgtcataagcaaaatgacgttggccgtcgctgacagttatcttcttcgacttctcattgttgtttatcagaacaaaggcatacgttccgtccgtattttcgaaagcagaacaggtaataccgttgtccgtataaccggtagtggcgatacgcacagctcccggcttcacaacacttgaaagatgagcaatgatatagtagtgagagttacgtatgattgtcttataatcactgttattgatatctaccgcaccatagcaagtctgacaaccaccttcacgattcggaccacggtcgttatcgagcatcagattccagacaattacgcccttacaccaattattgattgttcccaatgctacctcttccatatcttccatcagacgcttcgacaagtcacgtccgctgttccatgtgccgatagaagtttctgtaaacagaagttctttctcaggatatgcctgatgtatattcagcaattcttcacggttgccgccatagttatggtaagcagcacctgccagatactgagaagcagcagcatcttcgtaaatcttgcccggatagttcttctgcgattcgatatcgtcataattgtagttatggtcgaaagcataaatcttggtagacagtccggcagctttcatctgaggaccgagcgctgttttcacgaagtctctttgttcttcccattccatatagagcgaagcggagttgccacggttcaaaggttcattttgcggagttactgcataaatgtcaatgccttcggctttaaatgcctgtatccatttcacaaaataagtagcataatcctgataataatccgggttcaattgtccgttcgtccacgaatccaatggtgtacggtctgtcaggcttttcactttcatccatttcggacaggtccaaggagcggcaattaccttgatagaagggttaatggccagaatctctttcaggatcggaaggatatagtccttttcttcgctctgcaaagcaaagttttcgatccctttcgtatcacagcaggtatattcgcttaacgagaagtccgaacaaccgatggaaatacggatgtaactgaatccgaaaccatctttgtcggagaatgtttccgtcaggaaagcatgacggtcagccggtttcatcagtaacaggttgtaacaagtagaacctgtgatagctgctccgaaaccatccatcgtctggtactgttccgcaggattcaaagttattgtggtcggagccagattgtctttcgggctgaagttaaccgcgtcacgggccaaatcacgggtcagactgctggttgtcgtataaatggctacatctccggtggggacaggtactaccggtttttccgcatcatcactattgctacaagccgctaatatggtgaagcatcctaaaaaggtcagtgctatatttctcatgtttatcataatcgttagtttctttttctatttaaatacattataagcgatgttgtctccggctctatcaatatccggggttctgttcaatcttgtcattggcatcgattaccgattgtgggataggcaggcgataagagttcttatcaaaggcgtaaacctgtgacttgcgacctgaatctttcgcatatacggcgttcatcacctcttctaccttatccagacgaaccagatcaaaccagcgttgtccttcgaatgccagttccagccgacgttcgttgagcaatgcggtaatcatcgcatcccggtctttacgtacggatgaagacaattcgcccaatccggcacgttcacgtacttcgtcgatgatcttagctgccgcttccagatccggcgtatcctgcatgatcaatgcttctgccttcaataacagcacatcagcatagcggtatttaataatgctgctattagccgaacggcatttgtacatgaaaggataattgtccgacggataatagttgctccaattacaatcatagtaaactacggattcctgaaagcgaatctgatctccttctttcttgaaagcattgatcaaatcacgtgacggagttacccattttgcccaagtgaagttattattccagtttacaaggtcacgtccgaacatccatgtacaccagttacccgaaccgggagtaaactgagcttccagtatagattctttagtattacggacttttgcatccgttccggcagcattcatgccgaacaaatcgctaaaatccttcacaagctcaaaaccatcagccttcacctcgtcacagtaacggattacttttgaatagtcacgcaacggtttctctgcatagatctttgcaagaagagtacgggctacggattttgtaaacagagttttgttgcctgccgtattatccggcgcatgctggatggcagccagcaaatctttctctatctgctgataagcttccagttctgtgttttgtgccgggaaatattgttcatacacatcttcgatattttctgaagtaatatcatcagctactgttgtaataaccgggaaatccccccacagacgtaccatatcgaacatgaccatggcacggaatatcattgcttccgccttatactgcgcacgttcggcagtagtcaaagagttatcggtcaccaagtcaatattacatatcaatttattggcacgggcaacgtcttccagataacggttccagtcacgttcgagcacagagttggaaccttcgatggaattgttctcaaacggaagtacctcagctcccgtagttcctgcgtacgcattatccgcatgcgaatctgatatgagcaacaagtccacataccagtgttcctgacggtcgcgcatctgattgtagatagtcgtcaggtgactttctacagccgctttatctttaaataccacctttgtaccggtatccgtcacaccttcggtcgcatccgaataagtatcgatcggatcgtaattcagtgagcaggaagaaagtccgaacagcaaaccggaagtgagtccataaaatatatatcttagtttcatagtctttcctttcattagaattcaacattaataccaaacacgtatgatctagaatgcgggtatgtaccccagtcgatgccttgcaccgtaccgctgttgccccattggtttacttccgggtccatgccggagtagcttgtccatgtcagcagattggtagcggtaaagtaaggttgcagacgggtgattccccatttctgcagtaatttgcccttaaagttgtacgacaaggaaacgtctttcaatctcaggtaactgccatcttcaataaagtaagtagagttcagcaacttgaaattagctttcggcacattggttatctgtccgggtatcttccagcggttcagtactttggtagactgattctttccatcgtacatcccttctgtttctatacgggaagcattgaagatatcatttccataagagccttggataaacacactcaaattaaatcctttccatgagaaagtgttggtcagaccataagtaaagtccggattcgggtcgccgatataagtacggtcggaagtcgagattttaccatcaccactcaggtcacgatacattaattcacctgtctcaggatctacaccgtcactgatatatccgtaaaagcctcctaaagcacgtcccggctcattacgcactacataatcgttgactacatccgcagttttggcatcatagtacactttctgcaattcaagtttcgtcaatttgttccggttgaaggaaatattgaagtccgtatcccaggtaaatgctcccccccggaagttcttcgaactaatggtaagctcaaaacctttattagtcatttcaccttcattacgggcgatagaagtagctgcagcagcaccggcaggcagtgatacgttcatcagcatgttcttggtcttcttgtaatagtagtccatgttaaaagtcaaacgtccattcaatactgtcaggtccagaccaatattggtctgagtagtcgtttcccaagtaaggtcagacgtccgtaaattggcctggctgatagtcggtaccgcattcgcataatctgttgtatcaccttcagccgctaccttaaaccattcaatacgaccgatattataacgttgcaaataagcatagtcaccaataccagactgattacctgtctgtccccagcctccacgtattttaaaatcatcaatccacgtcagatcagccataaacttctcggaagatacacgccaggcagctgagaacgatggaaataccccccaacgatgatcaggatgcaacttagaagaaccgtcggcacgcaggttagccgtcaacaggtacttactatcaaaattgtaagctacacgtccgaaaaatgacataattccccattgagaagcacctgtaccggtattatcccaggcaatcttgttcgcggcattcaaggtctgtatcagatcattgcggtagtgtgaaccgtttatccagctgttagagtagtctgaatccgtccacgatgaccctgccattacctccagaccatgtctcttgaagttcttattgtaagtaaatacattgtcgaatgtcaataccgtattcatattccggttgtcggaagcttcaccatactggttacgtccccaggcagtagaaatcggatcaagaaaagtagtatttacagcattgcgacggtcaagtgttagagttgatttaaacttcaactccggcagcaaggtaagcaacacgttgcccgatgccagcaaacggttttccttatctttattattctttgcacgtgccatgttctccaacgggttggtgatatttccaactccatagaagttattgtaatactggttcggatttaaagcatcccagatcggagcatatgtcggcgtattgataacagccaatacaacgccaccgcgattcgctcctgttcccatcgctccccctccgttactggtatagtccgagtaggagatattagcacttactgtcaaccaactacgaatctgattttcaagattcacccggaaattataacgcttgtaataagagatatccagtattcccttttcatcgagatatccggcagaaagatagtatttcatcttttcattaccgttagatactgctacctgatagttttgcatctttccggtcttatatgtttcgtcaaaccaatcagtacggtcgggcagtccatcaggcaaggataccagtccgatttcatcctgtaactctttatactgcgcagcattcagagattctaccttatccgccaccttgtttaagccaaactgtgctgtcagagatacttttgcctttccggtcgctccggcctttgttgtaatcagaattacaccattggcagcacgcgaaccataaatagaagccgaagaggcatctttcagaatctgcatgctttcaatatcattcggagataaaaacttaatgttatccacaggaacaccatccactacatatagcggatcgttacttccgttcatagaagtagtaccacgcacacggatagacatctctcctcccggcgtaccgctaggctgaattacggagataccggctgccttaccctgaatagcctgtccggcagaaacgatgggacgtacatcaagatctttagtagacacagtggaaatggctgtcgtaacatctttacgttttaccgaaccatagccgatcacaactacttcttcaagtacttcattgtcttcctgaagtgtaactttcatctgtcgggatgctttctgttcctgcgatttatatcctacataagagaatattaaagtagcattggactggaccgtcaatgtaaagttaccgtctaaatcagttatcgctccgttagttgtccccttttcctgtacacttacaccgataagcggttctttctgtgcatccagcacctgaccggatgcagtaaattgttgtgcggatgcactcagagaaaaaaatactgctaagatagcaaagagaatcttgcgactccccgaaaggatttttcgcctgttctttttcatgcgtattaattttaaagtttataattaaggtatgtgcttgacaggactttcgccactatttcagaagcacaggtcaaaagtataaagaaactgaagtgatttgacaatgagggtataataagtggattatacaaacagacaaactactaataaacagcaagttaacatcaaccaaagaggcctaaaaagtggataggttacaacatcgatcaacgtattttccgaactaaatcttcgaaatcttctctggaaccacgagctttgttttttactttcgcccgataattataaattgtattcaccgaataacggagaaactctgctatttgtgaactatcttcaataccaagacgtattaatgcaaaaattctcagttcggtattcaataattcatctttcttcagaatgatttgttcattgtcttgcaataatgcattgaacttcttcacaaaatcgggaaataaatgcaggaaagcagtatcaaagttggcatatagttcttccaattcctcatcaagggcatcctgtgagcgggtgattttaagtaattctgctatctgaccagcagatactttcttatttaccatacgacgatatgcatcgagccgattgatataagtagagcagagtttaataaaacgggcaatatattcttccttaatctggttagattcagacagttctgcattggtagatgtcaaacaggcattcatttgctgtaattcttcattcaattgattcaattgatgattggctgtctgcagatgattccttgcaacagccaatttcttcatctgccggtatatatagcccaacgcaccaatcagcagcaccagcaatgccgtaatcagcactaaatactgctgaaggcggtcgttctgtttctcaatcatcgcctgataagttttatcaatcaaagaaagcacatcggcactctgccaacttcgaagacgagcattataaaatttggtagcattccacgagaaacgcatatattggtaagctctctccatatcgccattctcatagagcaactgagccaacatccacaaagaagcatgatctttaatagcagaacgaatatcagagatagcagaaaggcaaagattctgtttctctcttattttatctccaagatatttataaataagtgagcgatggtaagttacaagtgcatattgaggcgtatcgggctctgctgccatcagacgacggtcgtttatctccaaggcctcatcatacttgtgccggtcacgaaacaacgtttcgcgcatgaccataaattcttccgattgaggagataatatcgcatataatgaatctttatatgctgacgatatttcccgataataagcagataacgtctgatcttgtgtataaaatcccatctcaccatacacatgatcgaaacatgtataataatcaagtatcagatgtgaagttaccttctgtcggtctactgacttcaggacatcaattgattcggtatacatacccgtagaagaaagcaaaagagaaagttgcagcttactttctatttcccggtcagtatctcccagattacccgcgatacgaacattctcatttaaatagtaaatagcggaatcgcaaataaaggctttatattccttatagatctgattattcagattatagcgttctatggaattaggagccacgtctccggcaagctctttcagatgccgtatccgcgattcgcgctgtaccacataagtgtcatgtgccaagattgtctgatcaaggacatgcaatagtgaatcaagagtttcatcagcccatgagaaaatcggaaaagaagcaaacagcaacaacagcaaacatttatttttcattagagtattaaagttttgtaggaaatatgacattcttcactcaaggtttcacttataaatcagcgtcgacaaatattcctccgcaaacatctcattagcaacctccagcagttgttctgccgtcaacgcctcaatacgatggaacactgattctgacgattcatacttatgatagtgcagatatgttttcgccatacccagcgcattattctcgaaattatcagatgccacgccgatctggcctatcagttgcttcttcgctgccgccagctgagaagatgtcatcttcacatcccgcattcgcttcagttctttataggtcagtttcagacaggtatccatatcttcgatatccgtaccgaaatagatacagaaagctcctgtatcggtataagaagtcagattggactctacattatataccaatcccctccgctcgcgaagcgatacattcagcttactgttcatgcccggaccgccaagcacattattcagcagataaagtgccgtacgcttatcatcatacgcattgtatccccggctaccaatcattacatgcgcctgatgagtatctttaggcactaccaaccgttcgggcacataaagaggaggaggcatacgctgattatccaccgtcactgccgggatatcggacaaatgcttttccgccagacggataatcttcttgaaatcatgttgtccctgaacaaagaataccatattccccggttgataaaagcgacgggtaaacgagagaacatcctccgtacggaaactccgcagcagttccggcttaccgagaatgttccttcccaacggatggttacggaaaatcatatcttcaaaatcatcgaagatcaactccgaaggattatcctcataagactggatttcgtcaatgatcacttccgtctccttttctatttcatgctgcgggaaagtagaatggaatacaatatctccgagcaattcgagggcgcgttccagatgcccggtcaggaaggcggcatagacaaccgtctcctctttattcgtataggcattcagatcgccgcccacattctccatgcggttaaggatatgccacgctttccgcttctccgtccctttaaaaataagatgttccacgaaatgagccatcccctgctcatcctcagcctcatcgcgcgttccggcatcgatggcaaaaccacaataagctactttcgagagagtcggttcatgaattatgcgcaggccattcggcaatgtatattcgttgtaatgcattgttttctacttccttattgaattaatgccgcaaaaatacaataaaacttattgtcgtttatagaaaattgcagatatttgtagactatattagcaacaacgtgtatgaaaaagataggaatattctgttctgcctcggaaaacattgacaaaatgtactttgacagtgcccgtcaaatcggagaatggatgggaaaagcaggcaaaacgttgatttatggaggagccaatctcggactgatggaatgcgtagcccgcgccgtgaaagagaatggcggtacggtcatcggagtagttcctgccaaactggaagaaaaaggtagtgtgagcacattactggacgaggtgattcatacccgtaacctgagcgaccggaaagatgtgataacagagaagtcggagatattggtcgcattgcctggtggtgtaggtacactcgacgagattttccacgtcatagccgccgcctctatcggatatcatcagaaaaaggtgatcttctataacgaatacggtttttataatgaacttctggctgcacttaagacgttagaggataagggcttcgcccgacaatctttctctacctattatgaaacagcaaacaatctggatgaattaaaagaaaaaataaactgattatatgatagactccatcaaacaactcttgcaacaagaggcacaagcagtgctcaatatccctgtaacagacgcttacgagaaagcagtacaactgattgtagaacagatacatcagaaaaaagggaaattagtaacttccggcatgggaaaagccggacagattgccatgaacatcgccacaaccttctgctccaccggcattccatcggtcttcctgcaccccagcgaagcccagcacggcgacctcggcatcttacaaaaaaacgatttgctcctgcttatctccaactccggcaaaacacgcgaaatcgtggaactgacccgactggcacataatctggacccggaactgaagtttatcgttatcaccggaaatcccgacagcccgctggccaacgaatcaaacgtctgtctgagcaccggtaaacctgccgaagtttgtacgttaggcatgactcctactacatcgactaccgccatgaccgtcatcggtgacatactggtagtacagacaatgaagaagacaggattcaccatcgaagaatactcaaaacgccaccacggtggttatttgggcgaaaaatcaagatcgctatgcgaaaagtaatcggtatcggagaaacaatcctcgatatcatctttcggggaaaccagccttccgcagccgtaccgggaggctctgtattcaacggcatcgtatccctcggacgaatggggatcaaggtaggttttatcagtgaaacaggtaatgaccgggtaggaaatatcattctgcaattcatgcgtgaaaataatattccgacggatcacgtaaatgtcttcccggatggtaaatcacctgtatcactggcattcctcaatgaacagagcgatgccgaatatatcttctataaggattatcccaaacaacgtctggatgtgctttatcctaagttagaggaagacgatatcgtcatggtaggctcttactatgcgctcaacccggtactcagggagaagattctggaactgctggaccaggcacgcgagaagaaagcaatcatctattacgacccgaacttccgctcttcacataagaacgaagcaatgaaactagctcctacgattatcgagaatctggagtacgccgatattgtacggggatcgctggaagatttcttctatatgtatggcttgcaagatgtggacaagatatataaagacaagattaaattctactgcccgcggtttatatgcacggccggtggggacaaagtatcacttcgcaccaatctggtcagcaaagaatatccgatagaaccgctggaagcagtcagcaccatcggtgccggagataatttcaatgcgggattgatctacggattgcttaaatatgatgtacgataccgcgaccttaataatctgaatgaagaagtctgggacaaagtagttcagtgcgggaaagactttgccgccgaagtatgccgcagtttcagtaattcggtatcggtggagttcgccggacagtacgcatcgaagtaattacggatacaaccatcccctaaattactattaactttggctaataatcgcaaaggaattaccacatctagcggtaattcctatctttgcagtacatgattcatcagacaaagaaactatgtacagaaacctgttaaactggctgaccatcctactggtacttccgtcatgttccggcacttcgcccactatatccgtagtgtgtgaagagaacaatgtgggaaacgccattatcaaatgggaaacagcccctatactgaaaggacaggtaaaagtatatgcttccacttctcccgacttcattcccgaagaaaatcccgtagccaccatcaacattgaaaaagggaaaaagaccatcgtgaccaatgatccgtctcagcgctattactacctgatggtattcaacaacagataccgagtgagggtagctgcccgtaacgtcaatattcccggcattcagaacttccgtgacctgggaggatacaagtctgcagaaacaggcaaagatacccgctggggaatgctgtaccgttctgcacagattgacagcattccattctgctcccgccgggaattgaaaaacatgggcataaggactatcatcgatttgcgttcggaagaagaacgccataactatccacagtttcatgatgaagactttaacgtcctgcacctctccattgcaacaggaaacatggaacacatcctgcaagacatacgtgataagaaaatagaaacggatacgatctatcgtttagtagagcggatgaaccgtcaactggtcaccaactaccgcaaggaatacaaagaactgttcacactcctgctcgaccgcaacaattaccccgtcgtcatccactgtacttcaggcaaaggacgtacgggcattgtttcagcactggtacttgccgctttgggagtcaatgaagaagccatcatgaaagactatcgcctgagtaatgactatttcaacatccccaaagcctccagatacgcgtataaactccctatcaactcgcaggaagccatcactacaatctactctgccaaggaagacttcctgaatgcagccaaagaacagattgatgcggaatacggcagcgtacaggcatatctgaaaaaaggaataggactctcggcagaagaaatcgaacggttgcgcagcattttattaatagataatggttaatggaaaatggagaatgctatgcaggcagcaataattatccattatccattattcattattcattatttttctctatctttgcgcccgaaataaaagatatacagagatttaatgaagacatttgaagagcttggcgtttctccggagatacgtaaagcaattgaagagatgggatatgagaatcccatgccggtacaagaggaagtgattccgtaccttttaggagaaaataatgatgtagtagctcttgcacaaactggaacaggtaaaacagccgcattcggcctgcctctgctccaacagattgacgtaaagaacagggttccccagtcactaatactttgccccacccgtgagctatgcctccagatagcgggcgatctgaacgattactcaaaatacattgacggactgaaagtactgccagtttacggcggttcttccatcgacagccagatacgcagcctgaaacgcggcgtacatatcatcgtggcaacaccgggacgactgctcgacctgatggagcgcaaaaccgtatctttatcgaccgttcacaacatagtgatggacgaagcggacgaaatgctgaatatgggattcaccgacagcatcaacgctatccttgccgatgtccccaaagaacgaaacaccttgctcttctcggcaaccatgagccccgaaatcgcccgcatctccaagaactacttgcagaatgccaaggagattaccatcggacgcaagaacgaaagtacaagcaatgtgaaacacgtagcttataccgtacaagccaaagacaaatatgcagccctgaaacgcattgttgactattacccgcaaatatatggtatcattttctgccgtacccgtaaagaaacgcaggaaatagccgataaattgatgcaggaaggctataacgcagattcactgcacggagaactgtcacaggctcagcgcgatgccgtgatgcagaaattccgcatccgcaacctgcaattactggttgctacggacgttgccgcacgcggactggacgtagacgacctgacacacgtgatcaactacggcctgcccgatgatacggaaagctacacacatcgtagcggacgtaccggacgtgccggaaagacaggtacttccatcgctatcatcaacctgcgcgaaaaaggaaagctgcgtgagatagagcgcatcatcggcaagaagtttattgccggagaaatgccgacaggcaagcagatctgcgaaaaacagcttatcaaagtgattgatgaactggaaaaggtgaaggtaaacgaagaagaaatcacggacttcatgccggagatttatcgtaagctggaatggctgagcaaagaggatctgatcaaacgcatggtatcgcatgagttcaatcgttttctggactactaccgcgaccgtgaagagatcgagactccgaccgacagccgcgaacgtaacacacgtgacagccgtgaaagaggcagccgcaaggcagcgccgggtttcacccgcttattcatcaatctgggaaaaatggacagtttcttcccaagcgaactgatcagcttgctgaacagcaatacacgcggacgaatcgagttgggacgcattgacttgatgaaaaatttctccttcttcgaagtagaagagaaagaagcacaaaacgtagtgaaggcgttgaaccgcgctaactggaacggccgcaaagtatctgtagaagttgccggtgaggaagcaggagaaggtcggagaggcagtggttctgccgaacgcagaggaggaaaacgtcctttcggaagttcctccgaaaagcgtagtgacagtagccgcaactcacgttccgaaagatcggacagagcaccgcgagctgacagagcgactaaaggcagtgacaagaccgacaagaaaaaaagaagcgacaagcccagccgcgaagaacggggttacggagcacgtggtcctaaaaagacagacgactggcaacagttctttaaagataaagagcctgacttcagcgaggaaggatgggcacgcagaaagccgaaaaagaagtagattcttacttcatacataacaatctccttattcaatctcatcttaattgatgaaacaggattgaatagggagatttttttatctgaaaattccaatccatttttatagtttccaccttttcttcatatgccacgactccaacaggcagctaaaaggatgatagttttgtgacatatttatctctatttatgccacccaatcttattgatatactaatgtcataaaatcatatatataatcgtcagggtgcacctaactttgtctacaggaaataaaatcgcctattaatcaagtcagttttttaaggtacaaatatagaatagacagttttcagacaggagacaaaaagcaggtagtcttaatcaaataccactacctgctcaaaaaagaaaagaaaaaataaacatataatgtttttattactatgaattataaacaaacacttataggactactaatatgtatatcggcaatcacaagttgcgatacacaaaagcaactccctgcaaacaataatattgctttattccgagccagacaaacactagattccctatactctaattattccgttcccggtacctgtttgctgcgcgaaaactatccttcggacatcagtaattatgacgcaacttatcttacatctgaagaacaatcgaatagccccagactctattcttacatatggccgtactccggaactgtttccgcagtgattgctttgtttgcaactacgcaagatactatttaccaatcattactcgaaaataaagtactgatagggctggaagaatactacgatacccaaagaactcccgaagcctatgcttcctatatccacactgcaccacagtcagaacgtttctacgatgacaacatttggttaggcatcgactttctggatatttatttattgaccaaagaatcaaagtatctgcaaaaagcacagcatatgtggaaatttgtagaaagcggtatggatgataaactgggaggaggcatctattggtgcgaacaaaaacgaaagaacaaaaacacctgttgtaatgcccctggctcggtccttgctctaagactatttcaggtaacacaagacagcacctatctggacaaaggaaaacacttgtaccaatggactcaaacacagctacaggattctactgactatctgtactttgacaatattgatctggacggaaaaatcaataaaaccaaatatgcctacaacagcggacaaatgatgcaatctgccatcttattatatcaactgaccggtgagaaacaatacctgactgatgccgggaacatagccaaaggatgctacaactatttctttatggactatacacctaaagacggaggcactttcaaactgatcaaaaaaggagatatatggttcactgccgtgatgctgagagcctttatcgagctatatcaggcagataaaaacaagacctatctgaatgccttcattcaaagcctggattatgcatgggatcatgcacgggacgataatggattattcaatacggacttcagcggaagtacacgagacaataaaagatggctgttaacacaagcagccatggtcgaaatgtatgcccgccttgcagctatcaaataaaacagaaaaacgactaatattcatagacatgaaaaagagaaataccggactatgcttttttgcatttttatgtataaataatgcaaacgcaacagaagcaattgccagacaagacaacacaaaaataatcaattatactcaagaggccgcaatctatgagaccaatcgtcctgccgcaaaagacaggctctattcttctaaagcagtagaagagaaaatccagctgataaaaaagctattgaccaatgccagactagcgtggatgtttgagaactgctttcccaacacattggataccaccatccactaccgcctgcagaatggcaaacctgatacttttgtgtacacaggtgatattcatgcaatgtggctgcgtgactccggtgcacaagtctggccttatgtgcaattagcaaacaaagattctgaattgaagaaaatgctggaaggtgtcatccgccgccaattcaagtgtatcaacattgatccttatgcgaatggttataatgacggaccgacaggtggagactggatgtcggacatgactgacatgaagcctgagctccatgagcgcaaatgggaaatagactcgctttgttatcctcttcgtctagcttatcaatattggaaagagacaggagacagcagcatcttcgataaggaatggctggatgctatcacaaacgtactaaaaacattcaaagagcaacaaaggaagaacggtgtcggtccttacaaattccagcgtaaaacggaacgcgcactcgacaccctgaacaatggaggactgggagcccccgtcaatcctgtagggctgatcgtttcttctttccgtccttcggatgatgccacgacattacagtttctgataccttccaatttcttcgctgtttcttctttgagaaaagcagcagaaatcctttcgactgtaaaccggaacaatacactggctcaggactgtaccagtctggctaatgaagtagaaacggcattacagaaatatgcgacctatgatcatcctgaatatggcaccatttatgctttcgaagtcgatggcttcggaaatcgtatgctaatggacgatgcaaatgtacctagtttactagccatgccctatttgggagatatggacgttaacgatcctgtttatcagaatacccgccgtttcgtatggagcaaggataatccctatttctttaaaggaaaagccggcgaaggaattggtgggccgcatattggatatgatatgatatggccaatgagtattatgatgaaagcattcacaagtcaggatgatcaagaaatcaaagaatgtatcaagatgctaatggctacagatgcaggtacaggatttatacacgaatctttccataaagataatcctaccaaattcactcgtgcatggtttgcctggcaaaacacattattcggcgaacttattctgaaactgatcaatgaaggtaaacttgacttactgaacagcatatagtaaggtgatgtaaatcacagataagcacaaactaatactaaagaaatcaatatgaaacagaaaaagatcacactcgtatttttactaattgcaaatgtcttcggggcatttgctcagaaatggtatacgcctgatattgatcagaaagtagaagcacttctgaaacaaatgacagtagaagagaaactaggctacattggcggtgtcaactggatgtataccaaaaacatcgaccggttaggcattcaccgcatgagaatgtctgatggtccgcaaggattggggactaacggaaaatcaacagcatatccggcaaccgttatgttagccgctacctggaatgagaatcttgcctatcaatacggacagtcactgggacgtgattgcagagcgagaggagtcaatatcattttaggtcctgcagtcaacatttatcgtgctccgatgtgtgggcgaaactttgagtatatgggcgaagatccttatctaacttcccgtacggcagtaggctatatcaaaggagtacaagatcaaggtgtaatggcaaccatcaaacacttcatcgccaacaactccgattatgaccgtgaccacatcagcaacgatattgatgagcgtacattgaatgagatttatttcccaagctttaaggctgccgtacaggaagcggaagtcggagcagtgatgaccagctataatctgctgaacggaatctatacgacagaaagtccctggcttctaaaagaagtattgagaaatcaatggggattcaacggtgtagtgatgtccgactggggatctacccactattgcgttccggctgccaaaggaggactggatctcgaaatggcgggaggtgaaaaaatgaatccgaaggatatggcttactatctgaaaaccggagatgttaccattgatatggtagatgaaaaagtacgtcatattctgcgtgtactcattgcttttggcttcaaagatggcgtaggtgaagataaaagtattccattagataatcctgcatctgtcgaaacggctttaaatgttgccagagaaggtcttgttcttttaaagaatgagaagaacattctgcctattaatccccaaaagtataaacatatcatagttacgggtaaaaatgcacatggatatattaagggcggaggtagcggtggagtaatcccattccattatacaagtttatttgagggtatccgaaaagaaggtgaactgaacggcgtgaaagtggaatacgtagacgaactggatttccttccgggtattatgtacaccgacaacagtctcaaccagacgggtttccgtgccgaatacttcaacaatatcaacttcgaaggcaaccccgtagtaacgcaaaccgagaagaaaatcaattattcttgggcaggaggtaccgaactgccgggtatgaacagagagaactactcagtaagatggagtggcgtaatgtgtgcaaaagaaactgccgactttgacttctctatgggtggcgatgatggctaccgtgtatttatcaatgatcaggccgtaattgacgactggactccgggagctttcagaagcagcaatatcacaaaaacattggaagcgggagtaaagtatcgcatccgcattgaatattatcaaaaagggggtgctgccggtgtcaactttatctggaagaacaaaaacgaaaataaagacgaattctcagcttatctgaacaaagcagacctgatcatcgcttgtttcggacacaactccgacacagaaggcgaaggcagcgaccgcacattcggtcttcccgaaaaagacaaaaagatgcttgccagtatattcagcagtaagaaaccgactatcggtatcgtgaatgcaggtggaaatattgaaatgcaggaatgggaaccttctctcaaagggttaatctggggattctatggcggacaggaagccggaactgctgttagcgacgttttgtttggcaaggtaaatccttccggaaagttgcctatgacttttgaaaaaagatgggaagataaccctgcttacaatagctatcatgatccggatggagacaaacatgtagcatacacggaaggagttttcatcggttatcgcggctacgacaaactaaaacgtgatgtacaatatccttttggttatggattatcttatacaacgtttaagctgtctagtgtcactgtatcaaaacagaatgcagacggaacagtagaagttacttgcaaacttaccaatacaggaaagaaagaaggtgcacaagtggtacaggtttacgtaggtaaagcgggaagcagtgcggtagaacgtccggaaaaggaactgagaaagtttgaaaaggtattcttgaaagctggagaatctaaggctgtcaagatggttattcctcagagcgcatttacttatttcgatgtcaatacaaagaagtttgtgaaggatgctggtaattacaatgtaatgctaggcttctcttccagggatataaaggttcagaaggtagtacagattaattaagaaataatgagaacctgggggaaaagactcccaggtctatcaaacaccattatttaataaaatcattaatacttatgaaaacaattagacctttttatgcaggattattattattcctaagtttcatattttttgcgtgcaatagtgaattttcagagatagtggagccccccaaagaagttgccattccgtctataggttcactctccacagattctctaactagagctcttagaacaacagatatgtggtttgacccagcagctatgaaatggtggagtacacataaaggcactggtccaggtggaggtgaacataatacatactatatggaccattctgtatgcgattggaccttagacacttgtaaacattatattttaattcaatcctcatatgatatggggaaaatattttatatgcaaatacaatacagattcttacctcaaactttagaaatacatgatgatttaattccagagtcttcatggcattttttaggtgaagaatacgctcaagatgaatatccttatggaattataaaattagagtgtaaagaagttcctgaagtcgaagttaatgcacatgcctttcctaaaggaagaataggaatccgttatcgtgtatttggttatgcatttcctgggcaccccgatcctaatggcaattataatacaaatctcatttcagattggacttatacacatggtttagattattgttcaaatgattatggatatgttcttaatcccaaagtgctgactattcacgtcaattttcccaaaagttcttcttatgttacctattccactgaaatttcaattgaagatggtgaaagtgtgcatacatataacagcggtacttttgttttaaaaaaagttcgtcctaaaggaacatatagtgtgataacgaaagaaatttcctctttttcaggtccactcgtacaagcccatgacttcggatattatgatgaaagcataaatgaagtatacaccaattttgacataaaagattttagagagatgtatccataacatggacatattagttacattcaataatgtatattaattattctacctgtattgaattaacgattttattaactttataattattcacatgaaaagaaatctaagaaaaaaaacaccacatggtataacattcctgatgttatatctgattgtctgtctgattgcttgcaaggatgacaatttagcatctacttatgacccttccagtccggtggaaataatcaagattgacccagaagaaggcggtgtaggaactcaatgtttgatttacggtaaaaacttcggtactgacatatcgcagatagaagtaactgttaatgggaaaaaggccaatattgttggctccgatggcacttgtgtttactgtttcgttccagtaagagcaggaacagggccaataaaagtaaaagtaggagataaggataatgtacaagaggctgtctcagaaaaggacttcaaatattcttatgcattaagagtaagtacactttgtggatacgtagatgacagaggaagaagtgaaatcaaggatggagtaataagtaaaaaagacgatgtaggttttgaagcaccttattggctagaaatagataaaaaaacgggagatctttatctccttgaagagcgaaaagcaatccgccgaatcagtatggtaaaagatactgttgaaacagtattcaaaatcacagaaagtatgaatcaacctcgttcattatcattttcagtagatggagacactttgtttattagtaatgatcaagacaaagccgataacggaatttctacagctatagcattgcgttccagcggatttaaaaaggttacgccactcatatattcaaaaagttgctgcggttcaagctgtcatcccgtttaccctggagaatatttttacaatcaatggaatcaaggaaatatctttaagtgggatttcacagccaaaacgggaaaagaattatataaaattataggtgggcttaatggaaccattcaatttgctcctagtggtaaatttgcatatatgattgatagaggtgcccatatcatatataaagcaatgtatgacgaacaaacacatgaattacaaaaagcacaacctttttgtggatcaagaagtgaagctggctttaatgacgatattggggcagcggcaagattccgggatccggcccaaggttgctttgatgaagaagataatttctatctatgcgaccaaggcaactattgtattcgtaaaattactcctaacgggacagtcacgacttttgctggtcgtccaggtgattggggatatgctgatggagatttaagaaaagaggcacaatttaatcgtccattcgctatcgcatatgatcctacaacagaaactttctatgtcggagacaaaaataatatgcgtatccgcactatattaaaagaataatacttattaatgaaaaacattctattatgagaaaatatttattcatatggatacttgttttgagtagcatacaagcaacttttgctcaaaataatgtactccaagtaaccggcatcgtcaaagacgaggcaaacgaacctttaattggtgttaatatcatcatcaaggataatccaggactaggtgccattaccgacatgaacggtagattcaaaatcaaagctaaaggttatgatgtcttatgtttctcttatattggttatgataaacaagaaataccaattaaagaccgccaagtcataaacattaaaatggaacccagccaaagtagtgtattagatgaagtaactgtaacaggcacaggtatacaaaaaaaggctactgttacaggtgctatcaccactgttgatgttaatacactaagacactcaggtggcagcaatatcagtatcaacaatacattagcagggaacgtacctggtatcattgccatacaatactctggagaacctggacaagacacttccgaattttggattcgaggtatatcaactttcggagcaagtcaaaaagcattaatcctcgtagatggttttgaacgagaaatgtctgagttaaacattgaagatattgaatcattctctgtcttaaaagatgcttctgcaaccgctatttatggttcaaaaggcgctaatggtgttgtattaattacgacaaggcaagggcatagtgggaaagtaaaaattgaagctaaagtagagacaacctataatacccggacacgaactccggaatatgtagatgcctattcttatgcacaaatgatgaatgaggcattgattacacgtaacagagagcctaaatacactcctaaggaattggaaattattcgcatgggattagaccaagatttgtatccgaatgtcgattggcaggatgtattgttgaaagatggcgcttggacagaaacagcaaaacttaacattagtggtggtggtacaaccgcacgatattatttgtctggcagtttcatgaataacgaaggaatgtataaaacagacgacaccttaaaaaatcaatacaatacgaactctagcctaaaacgttggaactatcgtatgaatgtaaacctgaatatcactaaaacaactttaatacaggtagggatttctggccatttagataagcagaaccgtccaggacaagcggacaatgtatgggaagcaatcgtgggacaaaatcctatcagcattcctttaatatactccaatggaaaaattccagcaaccggaaaagaagataaccgtttgagtccgtggatgaatgccacacaaaccggatatcaagaatactggaaaaataaaatgcaaaccaatattagtctagagcaaaagctagactttatcactaaaggattgagatttctttggagatttgggtttgatactgaaaaccaaaatacaaatatgagaatcaaacgaccagaaatatcgatagcggaagctcgtcgcgaccgaaatggagacttggttatgaaacatcttgcagacgaaatcattatgtatcaaacttccagtaatgatggtaaccgaaaagaaaatatggaagcagaacttcattacgaccgaaatttcaagagcatacaccaaattggagcgactctgaaatatagtcaaagcgaagaagcccagacacaaaatgtgggcggagatatcatgagagcgatctctaaacgtaatcaaggtctttccggacggctaacttacggtttgcttggccgctatttcgctgaattcaactttggatatactggttctgagaactttagccatggtaaccagttcggtttcttcccagctgtttcctgtggatggaacattgccgaagaaaagtttatgaagaaacatataccgtggatagatatgttcaaaatccgttattcttatggtgaggttggcaatgaccgggtaggtcctccaaataatcctgtgagatttccttacctaactaattttggtgattataacgaatggagctatggtgattttgggaatgaaaataaatactccggctaccattattcacaagttgcatctccaggtttaagttgggaaattgctaaaaaacacaatttaggattggatgtttctgttctaaatggcaaattctcactaacagttgatttcttcaaagatacgcgagaggaaatttttctaagacgcgaatatctgccccaaattatcggcttaacaagtaaaccatgggcaaacgtagggaaaatgcaatcaataggtgctgacggaagtcttgtattccgccataaatttggcgagttcaaccttaccgtacgtagtaatatgacattaactaaaaatgagatattagactatgatgaagaagcaaatgcttatccatataaaatgataagtggattccgttatgaacaagcacgtggattaattgctgagggtctgttcaaagattatgatgagattcgcgtgagtccccgtcaacaattcggtgattacgctccaggcgacatcaaatacaaagatgtcaatggtgatggtgttattacagatcttgatgaagtacctatcggagccactaaagttcctaacgctatctacggactcggtctatcacttcaatggagaaatttcgatattaatgtacactttcaaggagccggaaaatctgcttatatgctcaatggtcctgccatacatgcattcagtaatggagcatggggaaatatcctcacagatttggaaaatcctcaaaatcgttggattgcgaaagaaatctcaggtacaccagatactgaaaatattcatgccaaatatccacgcttaagctatggaggacaaagtaataattaccgtagctctaccttttggctagctaacggctcttacatacgattcaaaactttagaaatagggtatacccttccaaaaaagttcataaataaagcattcatgaacagtgctcgcttctatttcttaggtagtaacctagctgtatgggattcgcttaaattatgggaccctgaagtcgtaagtcaagatggagccaaatatccacctgcaaaatcatttactattggactaaatgttaacttctaaatttatcatgatgaaaaaaagatatttattactatttgcagcaataggaagtggattactactttcttcttgctctgactatctgaacgttgacaaatattttaccgaccgaatgaacgagcagaagctatttgagaacaaagaatataccaataaatggttggctggtgtatactcacacttaataacatgtaaagatgtaggaagcaaacgttctgttatctacaatttctctgatgatatgtattttggggataattatggcaacatcagttacaatgtcttcaaatatggacaatataatgaaggcaatgagcaaaagtcatggagcgaagcctatattggtattcgtgatgcagctacctttataagatatgttgatattaacaaggaattgacttacgaacaaatacaagattataaggcacaagcccgttttcttcgtgcatattactattggcacttattacgtaaatatggaccaattcctttattaaaagaagaagctgattatacagatgcatatgatgatttagccattcctagaagtacttatgatgaatgtaccaattatattgttgaagagcttgttcttgctgccaaggatttacctttaaaccgtacttcactagaaataactcggcctactcgaggagccgcacttggattgcgtgctaaagtattgttatatgccgccagtccactagccaacccacgtccagaagatactgaaaagttcactgatttattagatgacaaagggaatcatctgatatcacaagtatacaatgaagaaaaatgggcaaaagcagcagcggcagctaaggatgttaccagtcttaataaatacaagatttatgtagctcctaaaagagataacgacgctggacgagaatatcctaaaaccgttatacctcctcataataacgaattttcagataaagactggccaaacgggtgggctgatattgatccgtttgaatcttaccggtcagtatttaatgctgagttacaaacctatacaaaccctgaactcattttttctcgcggactaaatcaaggagatgaaaacattagtacaatgatgtggcatcaaatacctttttcaataggagggcaaaactgtcatggcataacacagaaacaatgcgatacctattacacagatgcgggaacggacatcccgggtatgcatgattatatggctcctgattatcctgatcgaaatacactacccagggttactggttttgtcaatgccagtaataaagatcaacttcatcgaccattagaagaagatgtttatttaggatatgccaatagagaaccacgcttttatgcaactgtcgcatataatggttccacatgggactttgctacgtctgagaaagaagaagaccgatttatacgatgctggtattataatgaccaaccggatggaattcaaactgctaatccacagctttggctaagaacaggtattggcattaagaaatactataatccaattgaaacatacaaaaatcccaaaaaagaattgaataagacagatcctgccatgcgttatgctgaaattctattaatttatgcagaggctttgaatgaactaacaaatacctacagtattccttcttgggatggcaaacaaacctataccattcagcgcatagattctgaaatgagaaacgctattcgtccgattcgtattcgtgctggattgcctgattatagtccagagatttatggagacgccaatttatttagaaaatcattaaaacgggaacgtcaaattgaattatttgccgaaggtcatcgttattatgacttaagacgttggaaagacgcaccaagggaagaagcaactcctgtttacggttgcaatatgtttttgggttctcaaatgcgtgatgaattctataggccgacagtcgtagcttctatgcccgcagtattcgtccgaaaaatgtatttttggccaattgcacatgatgaattaaaaaagaataagcgattgacacagaatccaggttggacttattacgattaataaaattgaaaaatatgaaaacaatataccattatttaatagcccttttggcagtcctcatctatagttcctgtaataatgagtgggaagatgagctttacaaaaatgcaatctcattcgcacagaatggagtacaaaatatacatatacggtataaaccaggtggtaaagtcacttatcaattacctattgtggtgagcggttcccgtgaaaatgataaagactactttgtgaaagtagacgtagataaagataccttaaacaccatgaatttcgaacgattcagatatcgagacgacctttatttcaaatatttggaagaaaaattttggtcagtatcctctaatgaagtagtcattccagcaggacaaaacacagcgacattggacattacattctccttatcagaaatcaatatgtcacaacattggattctacctttaactattgcagatgatcctagttacgaagccaatcaccggaaacattatcggaaagctttgctaaacattataccttttaacgactattcaggacaatacggtgctacagccggatatgtatttaataaagcattaggaggattaaatgacaaaaatcctcaaactgttgccaatagagagttatttgtagtaagtgataattcagttttcttctacgccggtttgacagatgaagaactagaaaacagagaattatataaaatcattgccacttttaaaatgaatgataagaaagaagaagatggtagtgtaaacggaactgtcactttaacagctcctaatgctgataaaatcggatttaaagcagtatcaggtaacgttaacattaaaactgaaatggatccggtacaactttatttggaataccgatatgttacattgactttagaatatgaatatagttatctaattcctaattcttcggctacaatagactatatattccaaggcaatatggttatgaaacgctctcgcaatatttatattccagatgaagatcaagccatgatctggtaaaaggtatttttctagggtacaaatcatgtaccctagaaaagacttaatttatttaattatatatcaaatatttatcataaatcaataaccatgatatatattcttttctattaatatcttctctcttaataggatgtaacaatgaaaaaaacagaacttctccttctttttatatttactttactgtcagcagtatactctaaattatactctcagcaacctatccgaattgtctgcgtaggaaacagcatcacagagggattcggaaatacaagtgaagaagcagcatggcctgcccaagcgaacaagctattaggcaaccgatatgccttctctaattgtgcagtaagcggcacgaccatgtttaaaaatagtaatgctccttattggaaaacagaacgatacgcaaaggcaaaaagtctgaatccgcaaattctgattatcgcattaggaacgaatgatgccgacccctggcgttggaactcgctgaaaaatgaatttaaatctgattatctggatatggtaaaagagttcagacaaggaggaaaggatccaatcatttacgtatgcctccctcctcctttgtttggaccacaaaaagctgcccaaaatacggtagttgaaaacgaactaatccctcttatcaaggaaatagccggagagataggagcatacattatcgattaccatcaacccctgatcaatgcaaataaacaattcccggacaatgtacatccggatgatgcaggtgccgtactcatggcacagattgcctatgatcacattaagaaagcacaaatcatagtcccccatgtatctgtgaaaaaagggaaagtgagtgatgaaaccgtagctattgtcaaagaaggcggcacagttacttttgcccccaaaccgataaacggaacatggatatggacaggccccaatggtttctcttcaaacaatagagttgtaacattgaaaaacgtaaaaaacggtggcatctatactgctgtccatacaaacaacgaaggacaaagaagcattatcaattttcttgtttctataaaagggcgtgaggcaagtcccataacaccatccatacaaaacaagaacagagaatggatcaagaccaacaccctatcgactaatccaggaacaaccatcgttctaagtccgcaaacaaaagacgagaatggcacttggacatgggcaggaccgaacagtttctttgcatgcaaacgcgatatccgtttggatacccttactcccacacaagccggagaatacattgtgacctatacagacaaagaaggcagtcagagtcggtcaagtttctttgtcacagtagaaggagaagtggtttgtccggatctgattccctatattaatataaatggcaaatggcaatcgactgatgtaatggaagtaaaagaaggacagagtctgtctttcggtccccaccccttcaacggcgagtggatatggaaaggtccggatggatttaactgcgaccgaagagaagcttccgtatccaacttcaacagtcaaaaagccggtgaatatataggaacatttacaaatgcagcaggctgtaaagcagaattaatcattacgctgaaacttaaaaaataagatgctgctatcatgcaggaatatatcatatttacactacttttacagactataaatccatttaccattaaaccatgaatttaaagacaatcatcactgccctaggttgcggaatagcattgtttgtcagtgcccaaaacaagcacagtcttgtgcccgatactccttccaaagcgccggactatttttgcacctggaatctgcaaggctatttagtgagccatcaggatacaaaagtcactcgtaaagccatgaacgaagataatttgtttggtaaaggaaaataccagaattgggcaaattgttatccccgcattcgggaggacttatatcttgtattagatgattcctgggacatccccaaagaagtaaatgataaacccaacccctatctgggcacagtcgaattaaacgaagaacgtttcccgtcttttcatggtacgcctgaagaacggctccggcaacttgtcacccgcataaaagctaaaggctggaaaggtgccggcggctggatttgtgcacaaaaggcggataaccaacgtgaaacagacgagaaaagctattggacagaacgaatcaaaacagcggatgaagccggatttgactactggaaagttgattggggcaataacgcccgtaatggaaagtggcggaaaatgctgaccgatatcggaaaacaatatgctccacgcctgtacattgagcatgcctgcgaaaataagtttatagaattcagcgatgtattccgcacatatgatgtagagaacgtgatagcacaacctgtcactatccagcgtatttgcaatttacttccatatcaagcctcagcaaatacccaaggattgatcaactgtgaggatgagccttatatcgccgccggattaggctgtgccattggcatcatgagacatccctttactggaaatatgccggatggcaatcaggatgttgcttttccaccagtagggcgcgacatgaagaaaaggctggatgaagtagtaagagggatacgctggcatcgtatcgccgaaccttttggagtgaacggaaaagacttcgagatagataatgtacgtttggaagattattggattctgaaagagaaggagacttggatgaaaaaccgcaaacccggctctaaaatggttgaatctgctccggcccgtgtcagtcgcggcatgcctcttccggaagtatcggatagttgttcagcagacagaccgtatatcctatgttcccactatcccaacggagcaattgccgttgccagcataggccgctctctaaaccacgattacatttctaaaagaattggagtcactattcctgtcccacaaacaggagttcctattggagtgtttggctacttcgaggaactgactcttatattgactgatacactgaataccaagaactatagagttcttgcacaagatctggcaggagactcgcccgttaacatcaccaagaaaataaagataaaagataacagagttaccataccgggcgaattattaagtcgtatcggcttaatgaaagcttcaaagtatgattgctccgatccgggattggttatacaaatctttagaaatacaccattttgagttcaacttacgtaacctcaacattttaaagctaaaccgtgtagacaaagaatggatttaaaacctgaatagtacttgcaaacaaaactttatcatagtcatatttttccataactatctattatacaaacagatacaatgcaccttcttttattgatatcatgctttctccctgcatatttgagtgtcataattatgcttttctatgtatgatattgattgtcgcacaaatgctgcaacaattggctcacataatgtgcaacagctatcgcacattatatgagttagctgttgcacattatgtgagttagtatatacgtaacccattttatagaatgacaaattcaaatcagcagactatatgcctgtttgtattataaaagaataagaagatgcattgtaacagactgaacaactgaatgatagatgaaaacatgatttactgacgagtctcccataaatgtgaacataggacattttttagggtatgatggcaaatcatctgcttacttttctttcttgaacaagcgctgcaatgcatgcaagtctatttccatttgaggtttaaacttatccgacgccatatattccaaaagactttgcttgaattgaactacagatattcgattgtccaagtctgtatccaagtcaacactgcaaaccatcagatttcctttacctgctttcgcttcaaaaagtacgcccagttttctgtttttaaaccagtcatcaatcaaataaactatcggacgaaaatcctgcggcaaatcgtccatcaccattgcattacattttactgccaggtctttccattgaaagtcagaataaccatcgttagggaatgaggtaaatgccgcatgttcagggtcgcataagaagcctagagtatgaggtggacggttgcttgtccaagcagtattccaaaagatcggagtaaaagcaactttgatattccctcccatttccggtgagaccttcccataagaaaggaataagacatcttctccctgattcagtttatctatcgcttcattccactcataagtgataaatggcttcccggctatttctgcttttcgagcaggatatacccatatattccaatcattgcatatctccgtattttcgatgccaactttcaatttcaattgaacaggtgaaggaaagatatctaaagcgaaattgattgttccggcttctattaaattaccaataggcagatctcggttgaaagttcccgatttcactacattgccgtccttcgtttcaactgtccataaaatacgggcatcagaaagcggtttttctccaaaatgcgcaaattcaatatccgcccggaaagtttcatcattgttccagacaagcttcggtagtcttgccaaaggtacggtatgattacagaacatacgatattccttttcatccacataccctttactctcccagaaagcatccaacacaccgaccaaagcagttccctgtcccggaaaatcatgtaaatccaatagttggaaacctcctaatcccggagttcgcagggcggtttcaatctctgtcttataggacaaagtttgcaaacgtcccgacgcatacaagaatttatccgccatgtctcctaatcccttcgcattcaacgtttctttgaaaacctcaaaattccgtgcctttaaaacacccgtatatttatcaatctccttgaagttaggaaaaacgcaccactgaccaatctcatgactcaacattggcatttcctgacaaatcaccgctctatggtcatagtcagtgcgaggaacagacgtatttatgatgttactcatatcgcctccgatgcgcggccggtcggtattgtagtaatccgcattcttcacaaaaggccatccaccggaacttgtatacaatcttctgtcatcattttgcttccaatgggctatcaactcacttaagtatttcacctggttgtctccgccaggctcattcccataagcaagcatacaaaaagacggatgatttccatattctttcaggatacggtccccttcttctttaaaccattcatcctgtttctttccctcaccgatccaggtccatcctccgcattcaacttggagatacatccccatgctatcagcgacctgaaatgctgctgccggaggacaccaggaatggaaacggacatgatttaatccatgattcttgcatgctgtataaatctttgtccaatagtctgtcgtcatggcaggatagccggtgagaggaaaaatacaacattccaatgtaccccgaaggaaagtggtctgcccgttcacctcaaaatgagtcccgtttgctttaaattcacggaaaccaaaattcacatttttttcgcaggttccatccggcgaagataaagaagcgtgcaagcggtacacattaggagtaaactcagaccacatttgtacactatctgccagttcaacttccgtttccagactattgcccacaccaggatcaatgtccatcactattttcttgcctaaaaccgatcgattcttcaaaaagacatccatttccagctgtgactttttaacttcgccactcaaatgaatcctgatcttcgcttttttgttctttgcgtcaggataaatctggatatcgtccatgactaaagaaggaagtgcttgcatacttatttcgccaatcacaccattccagtttgtctgggtatggtccgagatgctatgggcgttggcacccacatcaatatgcatcctgttgtcaacacgtaaagacagcaaatgctttcccggagttaaagaattgatcagatatctatgaggcaccagcagtgcatcctgatgctctatcctttgaccatccatatacaatgaggtctcccaatgggtgcgctccagttcaaaaaaaatacgcttaccggtccaggcttccggtatctctatttctttctgataccaggcaacacccacataatgtttatccggattgagccaaaacggaaccttgatattaccaggctcacgatacttctcatattctttggcaacataccaggatttgtcgttcactgcccctgtccattgtgtatttacactgatatcatatcctttgccttgctcctgcaaagatcccggcaacttaacaaattccgggaacttctgcatagcccaatgatctttctcaccgacatcattactatccaaagcaaagttccagtttcctgctaaagaagatacagccatattctttgtctgacaagaacagacagcacacaaaacaagaacagatacactaaaaatgatcagatttcttttcatggtattaatcagctattatttgttttaaactccgtcaatctatcctgatagatgcagaacgtttacttactcccgttgcaccaaatgcctctatcgtcacataataagataaatcacggtcgaaaaagccaaattccgcctgatgatcgtgaaccattaccgcattccccatttgcccgggtgttgttccccaacgaatgacatagccggaggctgtatctaccctatcccatgagaaagccatccggcgtctgtcttcgttacgtttcacccggaagtttgaaacaacctccggccgtttacctttcgctttgccaaacagacgcatgtcggctatggaaaaacgacctatctgaaaatcttttgtattccgtacccttacaaaacgggcctgcacactcttctccaaaggtatcaattcatagatctggtctttggcattatccgaacggtcgaccatcgttttccactgttccccgtcagcagaatactctatgacatattgataaaccggcacgttctcatcacgccgataggtctggaaaccttcgtcggcaaagcagatctgcgcagcagccactttcatcgactgtcccaaatccatctgcaaccattctcctttctttccggtagcagccgaccagaccgttttaatattctcatccgccgccttttctgctccgtaggcagggtaagacgaggaggacttcatcctctttccataagaaagcaaattcattccggccgagaaatcaaccttactgaaatcgaccttcttatccggtagaataaatgggaaatcagtataatctgtaatgccatgcgcaatcccatccttatagtaagccgggaatatagcgatacgacgttcatagtggtctttgcctgcaacaaccatagtacctacataccagtcattgccataacggtctttaaaaggatgcccatgtccggcaccggctatgaaccctccgggtttaatagaaaagggtgctcccggcatacattgataaggtcccaaaggatttttggacacatagacacctgtacaataagaagtgaactcggtacccggagcagcatactgcaaataataataatccccttgccgagtgatgcagggagcttcattccatcctctcttgtcgtacacttcatttttatctccaaagacttcccagcccaatctttcggcattgtgaggaatcaggtctgcctcctttccaacaggtttaaatcctttttccggatctacttcgattccttggataggtttgctatctgagcaaccataatatagataaacacgaccgtcattatcctgaaaaagggcaggatctccatacttatccacagcaggctccacttcttcccattcgtcagcatcaggatttgtactccggtaaatccgctggtcgcccatactcaaatgatagatggcatttttgtataccagcacggccggtgcccagttttcaactgttttcagattacgggtcttcacgtactcccaatcttttagattctttgaatgccagtagccggaagagtgcgaggcgaacaaatagtatttatctttatacaaaacaatcaccggatctgccgcttcgcgccggcaaaccccttctatctgaaagcgataactcaggtttaaaggattggcagtgattctctctatggtattttgctgtgccgccaaagaacctgttatcatcaaagcgataaaagtcaatgctgttttcagtttcataactatagaatataagatgagatgattaataaatgccaaactcatagatacgtactacgtctcctcctttgttctgctccggacgcgttacaaaaaggcgtacatagcgtgccaataccggttctatcaatactttgttcaatgtattagtggaatttccacggacgccgtcgatcgttttccactcttcgcccgcttcatttttcacctgtaggaaacagtcactggtaatagaaccatgaccttcctgccccgcattgatcagtttccagctattgattgacttcttctctcccagatcaaaaacaacatagtggggagcaggagttgtcacacaccatttagtattgacatcaccgtctatcaggtatttggggtgctccccatcgtttacataaccagaccaggctatgatgcgggcactcttcaacagattctctttaggggcagcggcagcctgcaactgattctgctctctgttcgctgtgcggaacaactgtgaagccgatgttacggttgccatatcttcctgcaccaaggtagcggcgaatagtaccactttttcatttttaggtaaaacaagggatgtcgctcctttaggaatatcaataccgaacttaaagaggtaagtgtactcatacggacggtcttcgccggaaacatgacgatgtgtaccaacataagcaatctccgcttgtttcaggtatccttcagtgtgacctgtatgtccccactgtcctacaaatccggtgtagcaaggaatcatcacttcctgatggttctttccactcctgaaagtagccgcatagtcgccgtcggttgcagctgccaggaagtaaatgcgattgtacatttgtccggcaggaagctgcaaagtatctcctttgcaagtcataccattggctacatctttctctcctaaacggaaaggcacctgactggcaaagatggtatcgggcaataactcagccgcgtatgaataaccggcttcaaagttggcttcatttctgaactcattccacgaagaacatttcagattatagttcaacggcaaataagcatattccaacttagcagatggtaatgcggaaggtttcagcttcactctgaatgtcttgaccgaataaggtttgagagtcactttcagttgttttcccgtataaggtgtctcccctattttcttttctgttccatcagcctcacaagcaccggtgatttctcctgcaaaggttaacaatgcctgttgttccttctcacctccggtttcataaacacgtactacatattcgtccgaactttcagcctttttcagagctttaattaatacattcggattgctagatgtcataaaggaaaaatctttgcctaacgttcctttgtgtttctgcgtttggaaagccttcaatgactggttcaattgctctgcctgctgaactgtctccgttttatccagcttgccagcatgtcctatcaaactataagtgaagctatggaaaccgaagtcctgacggttttggtatggatagtttcctgctgtctccggagtgtggagcagagtcaaccggagtgtgtggtcgttgggtttatcccagccatatttactgtcattcaggatagagactccgtaactatgatcgttgtcagtcagatctgcccaatattgtgcatatacttcataggcagtctgtgtattattgccacgcatcacgctaccgatgccaagatcgtatgtagctttctcattatctacattcaaaggaaattctgctttcagaagtgcattagtgctctcccagtctatctcattccgaaagtcgatgcggtgtgcctggcttccttcatagagatggatatattggcagaatactgattttccatgttgttttcttatacataatgtcttgcggagttttccattctctgtcaatgttacttttaccgatgagccgccgatagaaataggatctttatcaatcgtctctttcagaatctcccaggccggccagttatacgacttattttcagtaaagagagcaaggcgaatggcttttccctgttttacgatttctttattatttcttttgtctatcagggaggtgatgtctccgttggaatccagactcatccggtagacagagttttctatctgataggttccgttatgctgaagaatagaaagtgatgctgcctctttattaccggaaatacgcacatcatacactgcatatccgacagccggaactgtagcgtcaactaatattctagctttgccatcgttgtaagagagtaactgggaaggtacctttgttccttttgcatcaaaaactgaaattcctccaggagatccgggcatatcaacttctacttctacagtatgatttacctgaaatcctaatgcattatacagtattacgggaatccctttcactcgtgtatccagctcgctggcaatgccgtggaccgaagaagccagaatgtgagagaactggttgagggaaatcagttcatcattccatgaaaactcataagcacggggaatgcttgttcctgtgaggtcatcatggaactgatgcaggatgaaacgtttccaggcatcagagagagtcgtactgggataagacttccggttcaaccattctgctcctacagcagccctttctgcagcatcacccagcagttcattctggcgattgtacaacttcatagcggcttgtgaggtataacacccagttccatgtacatccattaaaagttctccgtcgaatacgggtaattccgaatggttctcataaggtaaatagtctttaaagagctggtcactggtagcactgattatctgcaacggtccgtttccacgaatacccttttctacggaacgaacagaaccgatagtcggtgaaccacccacgtctccggtaccataataacgatagactgtatttaaaggagtacgctttgttaaatcaaagaggtctttattctctgacaaatctacgtcattccatctttccccatatccatatccatgagacagcatgatagaggagccatctatacctttccatagaccaatggtaaaaggatgcttgctaccattatagaaaggatgtacacgccaatccagtttttgtgatgaaaatccgataagtccgcaatgagaagcaatagtaggcaatgtccagccaaacccaaaacagtcaggaagaaaaatatccgtactctccgtctgaaactctctccggtaatattcctgacccaacaggatattccggatggtcgattccggtgaaggaaccagcacatcattgacatcccagctactgccggatatgtgccaacgtccttccttgacgtattctttcagttgggcaaactctgccggataaaattctttcatccatgcgtatttgactccaccttcaaaattaaagatataatcaggataacgtttcagcaataaaaggttttggctgagtgtattccatacatactctttgatggtcgtctggacatcccagttccattgagtatccaaatgcgcatcagctaccatatatgcttttgctttcttttccgaaacagactgtgcctgtagagacatattcggagaaatcaataataagaaggttactcctgcgataagcaggcatttaatcttgttgtacccaataatcatatttttcatgtttaatgttttaagatgtacacaaagttacgcccttataaacatacgataatacgaatacgagacaatatagtatagatagacagaagcgtccttaaaacagacagatatgtcctaattacgtacaccggcagtgacaaagccatgccctacacctagtataaatatatggtatttaaagtgaatgtataataatgtcacaaattcatcataaataatcattaaaaggcgttacttttgtaatcgaaagaaatccctaaaacacatatcatgaaaaaacatttatttttgctgctctgtctttatacgtctttacatacttatggacaaaaggcatacaagctacaatcgccggatggcaatatccaggtatccataagtctctcagacaaaatctattatgatgtaacttaccagcaagatacattattgaaacaatgcaacctccaaatggaattaagcaaccaagagctcggaaatgctcctaagttggcaggagtcaacaagaaaagtgttgatgaatctttaaagccggtcattcctctgaagtattctactgttgccaataaatacaaccagttgttgatgaagttcaaaggagattactcagtagaatttcgtgcattcaatgacggaatcgcctatcgcttcatcaccaataaaaaaggaatgattgaagtcaacaatgagacattccaagttaatttcccggaaaactatctgctccatgtacaacatccgggaggatttaaaactgcctatgaagaagaatacaaacatatagaaagtaaagactggaaatcatccgataaaatggctttacttcctatattgattgatactcataaagactataagattctgatcagcgaatctgacttagccgattatccggcacttttccttaaaagcaatgggaataatggtatgttctccgtattccccaaggttccccttgaattcggtgatgacggcgaccgcagtctcaagatactcaaagaagcaaattatatagctaaaacaaatggtaaacgcagttttccgtggcgttacttcgtcatcagcaaagaagatggagaaatagtagaaaacacaatgacttacaagcttgctgagaaaaacaaactggaagacacctcctggattaaacccggactggcaagctgggaatggtggaatggcgctactccttacggaccggatgtcgacttcgtagcaggttgcaacctgaatacttataaatactttatcgactttgcatccagatatggcatctcttatattataatggacgaaggctgggccaaatcgacccgtgatccttatactcctaacccggaagtagatgtgcacgagcttatccgctatggcaaggaaaagaatgtaggtattgtattgtggctgacctggctgacggtagagaaaaacttcggcttattcgagacctttgagaaatggggtgtgaaaggggtgaaaattgactttatggacagaagcgaccagtggatggtggattattatgaaagagtggccaaagaagctgccaaacatcatctgttcgtcgacttccacggctcattcaagcctgccggactggagtataaatacccgaatgtactatcatacgaaggagtgagagggatggaacaaatgggaggatgcagaccggacaatagtgtataccttccttttatgagaaatgcagtaggtcctatggactacactccgggagccatgctaagtatgcaaccggaaatttatcgctctgaacgccccaattctgccagcatcggtacacgagcttaccagatggcattatttgtcatcttcgaaagcggaatccagatgatggcagataacccgaccctctactaccgcaatgacgaatgtactaagtttatgactcaggttccgcaaacctgggatgagactattgccctgaaagccaaagtaggagaatatgtcattgttgccaaacgcaaaggagacaaatggtatatcggaggtatgaccaacaaccaaaagcaacaaagagaattcgagctaaaccttgatttcctgaaagacggcaagaattatcgaatgacttcttttgaagatggcgtcaatgcaaaccgacaagcgatggactaccgtaaaaaagaacgcgactttaaaaaaggagataaagtaactgtccgcctggcacgcaatggtggatttgccgctgtaatagaataatttactaactaatacgattcatgaaaagattattaattcccggtgcaatgactgcacttctgttcacatccctctctgccatcgcacaaacagcagagaaaccagaatggaacaacgagtatgtttcggaagtaaacagggaaaaggcatgtcagattgccattcctttcgctgacgaacaacaagctacgaagctggctatcgaagagtcaccttactacaaaacactaaatggaatatggaagttccattgggttgccgatcctaaagaccgtccgcaggatttctacttaccgaactacgacgtaactcaatgggataatataaaagtgcccgccacctggcaaatagaagctgtacgtcacaataagaactgggataaaccattatattgcaataccatttatcctttttgtccatggaacaaggtgcaatggcctaatgtcatccaacctcgtccttctgactatacattcgctacgatgcccaatcctgtaggaagttatcgcagagatttcactttaccggattcatggaaaggacgtgatgtatttatccgtttcaacggtgtggaagccggattttatatctgggtaaatggaaagaaagtcggatactcagaagacagctacctgcctgcagagttcaacctgactccttatctgaaaccgggaaaaaatgtgctggctgtagaagtttatcgattcacggatggaagttatctggaatgtcaggatttctggcgtttcagcggtatattccgggatgccttcctgtggtcggctcccaaaacacaaatcagggatttctttttccgcactgatttagatcaggattataaaaatgcaacagtctctttagacattgaggtaacaggaaagaaaagtaatgacgaaatcttagttaaactgaccgatttggagggcaaagagattgctacacaatccgcacgcgccaaaatgggagtaaataaccttcagtttgaagtaatgaatcctctgaaatggactgcagagacaccgaatctttacaatctgactgtacttctgaaacaaaaaggaaaaacgacagatatccgtaatgtaaaagtcggctttcgtaaaatagaactagctaaagacggacagatgctgatcaatggtaaatcgactttatttaaaggagtcgacaggcatgaccacagccctgaaaatggacgtactgtgtctaaagaagaaatggagaaggatgtacagttgatgaaatcgctgaatgtaaacgctgtacgtacttctcactatcccaacaatccttatttctatgacctgtgcgacagatatggtatctatgtgctttctgaagccaatgtagaatgccacggactcatggctttatccggcgaaccttcatggaaggatgctttcaccatccgtaatgaaaatatggtgagacgatacagaaatcacgcttccatcgtaatgtggtcaatgggaaatgaatcgggcggaggagataacttcctgagtgccgagagagctatcaagaagctggataccacacgtcctacccactacgaaggaaacagttcttattgtgacgtcaccagctgtatgtatcccaacgtacaatggctggaaagtgtaggtaaggaacgtttagaaaaatcacagaaaggcgaaacagtaaaaccacatgtggtatgtgaatatgcccatgccatgggaaattcaataggtaactttaaagaatactgggaaacgtatgaacactatccggcacttatcggtggtttcatctgggactgggtggatcaaagtatcaaaatgccgacacctgacggtaccggttactacatggctgtaggaggcgacttcggagacaaaccgaacgatggcaacttttgcacgaatggagtcattttctccgaccgtaccttcgctgccaaagctctcgaggtgaaaaagatacaccagcctgtaggtatcgaaaacctgggcgacggaaaatacaaagtaaagaacaaaagattccatacgaatctggaagacttatatggaagatatgaaatagaggaagacggcaaagtcatcgcatccggcaacctggacgatctgacaatgaatgcacaggaaagcaaggttatcaccattgctgatgcacaaataaagagaatccccggagctgaatatttcatcaaattcagtttcagattaaagaaagatacggaatgggaaaaagccggatatgaggtagcatccgaacaattcaaactctcagatagtgaaaagcctattttcaaaccagggaaaggagatatcaaactagtagaaacagaccaggcttatcttgtaaaaggtgaccggtttgaagcagccttctccaagcaggaaggaaccatctcggcttatatactggacgaagtttctttaataaacaagggattagaactgaatgttttccgtgctcctaccgacaatgacaaacaggtagatggagactggcaacgaaaagggctttataatatggctttagaagctggccgttggaccgtacgccaagaagatggaaaggtaatcctgcaaataaagaacacctataaaggtaaaatagggttcgatttccagacagaaattgaatatactgtggctgccgatggctctatcttggtaaacagtacgatcattcctgccattaatggagaaatcattcctcgtgtaggttatcgtatggagttgccggaaggatttgaacggatgcgttggtatggacgcggaccgtcagagaattatgtagaccgcaaagacgccagttatgtgggagtatacaatgatttggtatccaaccaatgggaaaactacatcagatcacaggagatgggtaatcatgaggatgtacgctggatttcagtaaccaaccccgatggcataggatttgtctttgttgcaggagataagatggctgcatcagcactacatgtaaaggcacaggatatggtggacccgaacaatcttagaaaaatgttccataaatacgaagtacctgcaagaaaagaaacaattctctgcctggatgctaaacaacgcccattaggaaatgcaagttgcggtcctggcccgatgcagaaatatgagcttctttctcaaccgactgtattcagctttatcatgatgcctttggaaagagcttatttgcaagaagaactagttgagaaagctcgtgtacaaatgcctgtatgtatgcctgttttaatagaaagagataataacggttatttaagtctaaagactcaaacacccggagctactattctctatagtttgaacggagcagaatacaagacttatacagaaccaatagaatttatttccggcggtaacgtacaggcatatgctacttcagaaaaactcgaaaaaagcttgaaaacatctgttgaacttcctatctatgtagaccgttctgcctggaagatagtatctgtaagcagtgaaaacaatggagaagaagcacgcaatgccattgatggtgacccgactacaatttggcacagtcgctgggcagaacctgtagcaaagcatcctcatgaaatagtagtagatatggcatctttgcttgaagtagacaagtttatctatcagccgcgtaactccgaaaacggccgaattaaagactatgaactttatttcagcaaggacggaaagagttgggaaaacaaaaccaaaggtgtcttcgaaaactcatcttcagcacaaattgtgactttaaaggaaccggtcacagcacgttatttcaaattggtagcgctatctgaaatacacggcagagactgggcttcagccgctgaattgaatgtcaatataactaagaacttatcgggtacatccggaggaaagcaaacagtagtgtatgtagacagtgatgcagatggaagtatgaagctagctgccgatggtgataaaaatacatattggcacaccgtacacaaccaattctacttggcaccttatcctcatgaaattcaaatggctttaggcaaggagatgaaagtaaagggcatcaaatatacccctcgccaggactctgccgaaggaaggatagccaaatatgaattgtacgtcagccgtgatggcaaagaatggggaaaagcagttgcttccggtacatttaataactccaaagagacacagactgttgaatttacaccatgtcaggcacgctatgttaaactacaggctttgtctgctattaaaggagataaactagccgctatagcagaactggaaattctttctgcagaataagtttcaaattaagtatataataaacgtagatggtatgcataaaacaaaagcaccatctacgttttttgtattttagatatagagcaaaacaaaaaagttatccatctccttcttttttgttctattttagaacaaaataacaggatttttatatacatttgtggagcttattgttataccatgcataaacaaacacactactccgcaagatttttattgttcataggcattatatgctgtctgccaccgacgcttcatgcatatagcttacgacaattctccaacaaagatgggttgtccaacagtgctattctatctctttatcaagaccaacaaggcataatatggattggctcatgtgatggtctgaatgtgtttgacggagtcaatatacagatatatggtccaaacgatcccccgaaaacgttattatcaggaaatctgattaatcacatcatggaggctgaaaaaaatgtgttttggatacagacaaattatggactcgaccgattggataccaagcagcaaatatgtcaaagttttaccgaatttaaagacaacaaccatatagcaaaaagtgatgacaatgagatcttcatcataaaagacaatggatgcctttattattatcaacgagaactacaaaaatttcagaaaatagagattcctcaaatagcattcaaacatatactgtccatcacaattgatgcaaatgatgtattatggattttcacatccgacaatgacacacgcagttatcaggtaaaaaaaacagatcataatataactttaattcctaataacctattcaaacattctgagaaactactatgggctttttctgaagaacatttagtctactttatcgatgaaacttattcactatatgaatatgatttcaccaaccagaagcaatatttcatagcagatcttaagacagagatcgaagttcatggagaagtttcttctattatcaagcaacaagatgattactatatcggctttaaaagtagcggactaatcattttaaaatatatggccgatcagaaaattaagtatcaaatacaatccactgaaattcattcgggcatcttttgtttaatgaaagacaagttccaggatattgtctggataggaacagatggtcaaggtgtgtatatgtactataatgatacgttctctataacaaacactttgttagacactccggtatatcaaataaacaatcccgtgcgcacactttattacgacgaagagcatacactatggatcgggacaaagggaggaggaatactacgtattaaagattactcgcctgaaatcagtgcgccaacttcttttgaatatatgacagctggcaatagtacattgacagataatactgtctattgctttgcacccggttctctgaataagttatggataggcacagaaaatggaattaactactactcatacaaagagaaacgactaaaagaactgccagtgacagctgacgggaaaaaagtaaagtatgtgcattccataaatgaattgaatgatacaaccttatggattgcgactgttggtgaaggcatcgtaaaagttatcttaaaagaccctgccgtttctcccattataaagtctgcagacagaattgttctggatgaaggacgcatggcatccaactatttctttacctcttttcaagaaaatgattctattctatggttcggcaatcgtggctatggagcttatcatctgaatgcaaagacaggaaagttaacttcccacaaatttgatgatattgtgaacagccagacagccaatgacattttcgttattcataaaaatgcgaaaggatattggttgggaaccagctcaggactactccactttactcctaatgacacacattaccacaacagagccagtttaatttcaaacaacaccgtacacggtatcctggaggacttgcaagataatctctggataagcactaaccagggactggtaagattcaaccctgaaaccaatacaggacaaacatataacagagaaaacgggctgtcaattaccgaattcagtgatggcgctttttataaagataaacgaacagaaacattattttttggcggaaccaacggattcgttaccatccgatccaataactatcttacagaagattatatgcctcaaattcatttaaaaggattatctattttcggtaaagaacataacatcaataattttctccaggttaaaaacgaacaaacgatcctgcaactggattacaaccaaaacttcttctgtattaactttatggcacttgactatatcaacggtaataatttctcttattcttataagcttgataaaatcagtgagcattggatagatagtgaaacgtcttccagtgctatcttttcaaaccttgctcccggtcaatacaccttactggtaaaatacaggaataatataaacgggaaagaaagccatatccaggaactcatcatccgtattattcctccctggtatttaagttattgggcatataccatctattttatcttattcgcctctttctgtgcctcaacggtttatcattttatcagaaagtaccgccgcaaacaatatcgcatgatcgaaaaaatgaaccgggaaaaaaaagaagaaatctacgaatccaagctacgtttctttaccaacatcacacatgagttctgcacacctctgacattaatttatggtccatgtgaaaaaatactagcttatccgcatactgatccatacattcgtaaatacggactaatcatacagcaaaatacagaaaggttaaacagccttattttggaattacttgaatttcgcagactagagaccggcaataaggttctatatatccaaagtttgcctgtgtcggacaaacttagaggcatagcagaatcattcaatgaactgatcgagaacagagaactaaactaccaactaaatatcgaaccggatattcagtggaatacagatatcagttgtttcaataagatagctaacaatttgttatccaatgcatttaaatacacgccggataaaggcagcattactgttgatctgaagatagaaaatcaacttctaacccttcggatatccaactccgggaaagggatagccaaagagaacttaaataagatatttgaccgttataaaatactggattcttttgagttgaatggaaaaaactcacgaaacggactggggttagccatatgtaaaagcatgattactcaactgaacgggcagattaacgttgacagcatccctggtgaaattacaacattcactgttatcttaccggaaatgccactgactgaacaggaatcctcccaagaagtatataaaacaacacagttaaaaaccaatactgaacccatcgaattagaaaagacagccacaaatttcgacgcttccagacaaacaatcatgattattgacgatgatccttctatgctttggtttgtctcggagatatttgttgataaatacaatgtgttatcttttaataatgccaaagaagcattaaccaccttggaattaaagcagcctgacctaatcatttcagacgtgatgatgcctgaaattgacggactctctttcacacatcgcattaaacaaaataagctatggagtcatataccattgattttactatctgcccttcatcatgaagacgatcaggtaaaaggtcttgattcaggagcagaggcatatgtcactaagcccttcaatgtgaaatatctggaaaaaatagtatatcggttgatacaacgcaaatctgagttaaaggaatattatagttccgtattcagctctttccaaatagaaaatgggaattgcatacataaagaagatcaagatttctttaacaaagtaatagaaactatagacaagaatattaccaatccagatctgtccgttgaattattgagtagcgaattaggttacagtacccgtcaattctatcgaaaactaaaaccgataacggaaaagtcacctgctgatattatcaaagaatatcgcctcagtatggctgagcgtttactgctaaccaggaacctcaccattgaagagattatggataaaacaggattcactaatcgtggtacattttataaactattctctctgcgatttggtatgccaccacgtcaatatagagaacagcagaaagacaatgtagtaaaacactccgaactataagccattgataaatacctactttcatggcttataatataaccagattatctccataatgaacagattaccttcactatgatcagattatttcctaatttgaacaatcgtttacaccttttcttcttttaaatctctatttttacaatcagctaaggcacttaaattatacaataacaaaaattacaaaacatgagaaaagcacatctgatgctagttggtttactactctcttttgcagcaaacgcaaccaatgatattccccggccggaatatccccgcccacaatttgaaagaactacctgggttaatttaaatggtacgtggacatatgaattcgatcttgatgattccgggaaaaagcgtaacttacctacggcaaaggagcttagcaaaacaattacggttcctttctgcccggaaagcaaactatccggagttaatcatacggactttataaaaaaaatgtggtatcaacgttctctgccgatacccgctgactggagtaacaagaagattttactccatttcggtgctgttgactatttagcagagatttatatagacggacacctcgtcggttttcataacggcggaagctctccttttgtaatagatatcagccgcatagccaaacccgggaatagccacaatctggtagtatccgtgtccgatgatgcaaaatcgggtcgtcaggcatgcggcaaacagtctccggagaagaactcctttgcctgtttttatacccgtgtcacaggtatctggcaaacggtgtggatggaagcgctctctccctgtggactgaaatcggcaaatacctatccagatatcgacaataatcaattgatcattactccggaattctatcagatatccaatgaccagacactggaagttacgatctatgacagccagaaaaaagtcgctcaagtgacatcaaaatgtgctaatggcagtaacctgatcttaccgataaagaatatcaagctctggagccccgaaactccccacctttacgatatcagttactgcgtcaaagatgccaaagggcagatcatcgatgaggtaaaatcatatgtaggtatgcgcaaagtgcatatagccaatggcaaattttacttgaataacgagccttatttccagcgtctggttatgaatcaggggtattatcctgatggaatctggactgcacctaccgatgaagcccttaaaaatgatattttactaagtaagaaagccggcttcaacggggcacggcttcatcaaaagttttttgaagaacgattccattactgggcagataagctgggatttatcacttggggagagtctcctaactggggaatgaatcccgatgacgaggtcgcatcaagaaatcttctcagtgaatggatagagatactcgaacgagaccgtaatcacccttctatcatcacatgggcacctcttaccgtaccattgagcaatgttacatccggtacatttgcacgcttggtatttgacctacaaaaactgacaaaagcaatcgatcccagtcgcccgttcaacgaccttaccggcagtggattccatttcctgacagatatctggagcatcagtacttacgaaccggatgcaacacgtttcgcactaagcttaaagccggacaagaaccaggcagcttatgccaaccaaccttttatcatcggtgaattcggcggtattgtatgggagacatccagaaccaaggaagacacatggggacatggaggaacatttaccaacgaagatgccctcttcgaacgcatcgaaaaactcatcaatgcgattcaatcctccggaatcatcagcggactctgctatacacagttttcagatatcgaacaagagaaaaacggtatctacacttacgaccgacagcctaaatttgatatggaacggattagatctatctttgaaaagattccaagcagaccgataaagaaataagttcagcttgctaatagtataattcagcccgtcaatatattcaaatcgaattatatcgacgggctgaatatccctttaatcagggtgcaaccttaccgtttactctcaatatattcaatcgcttttctaatccacatatcttctcctgcagctatatcttctacagtctgttccaccggaatatcaatagtcactccatcccgttgatttaatttccattcaggatagaatgctcccgccattgtataggtgaatttaattccccgaggcaaatataaatatccgacatgaccgttcgcaccggcagtttgcgtaccgataaccgcactttttggtgccactctataagcgacagacattagctctccaaaactctgagtcatctcatttacaagaatagcaatcttacctttgaaataatcaggattttctttaaaaccaatttttccaattatatcaagaccaaagttacccggaaatttcttcgaattaatggaataccacataaatgtagttggttgaggataaaggtattttccaagtacttccataatgtcccatctcggatacttacgcatatccaatatcattcctttggcattcaaatttgttttcatcatctgatccagttccgggagccctattatacctgcatctacataaagaatctttctggcatccagtccgtaatctgacggactcttccgacctttaaaagatgctctttcaaaagactgcatgggtatcgcatattcataggactgcccttgattctccactgtgactttcatttcattctccgatgtaacaaatagtctgaatgcgacattcctcagtaaaccatgctcatttgaagaaggcaatatagaacggtaattgtcgattatttccgcaatcggtttatcatttacagccagtatgaccgatccacgctcaatctgctttaatgcagttgattctactacaagcttaccgtccgttgtctgagtcaatcccaatggaagaccatacaatcggggagcatgattcggaaattcaagccctccatgtgaatcattgatttcagcagccagttttcgtatagaatggtccaaatctttttccgaagaggcataaataaattcaggcagatattgcgccagcagagtactccatctatggtctgtaaggttggcgtaaggatatccatgttcgatggcattccacaatctataaaccgtaagaatacgatatccctgatcttcccaatcgattgaaggataaggtttgtctctggcaaattccacctcctcctttccggttaatatcggaagatagtagttcaatacactattacgtttggcattcttgattctcactagtttttcagacagtttcttatcgaagacattcggatcttccagccagccaagctgtgcaaaacgatgatattgggccgaatctccgattacatactcctcggtttccgtgattttaccgtacttatctatccattcgtttaacagtgagttcctttcctttttgctcttcgcagctgctatcccgggcatcactctgaacaattcaaaatcccagttatactttccaaccacaacctgcggatgaaaatacttaaggaatccccaaaccttgcccaaaaccacaagattttccaatgtttgcccgtcaacgtctccaagcgatattcctgaatttcctgcgaactccagatccttgtccacttcaacatccggattcttaattaaatcaagtgactgtccatctatcagcacctggcagtcgttcacccaaagcctggcctccccatcacagagtattcgaaagaaaaatttcttggaacgtgtaaacggcatttccacacaaaagtctttccagccctgactgccgttacattccaaaccaatagccttctcgtctattctttgaaggtgggtatccagtttaattgcgaaactcactttggcattatttgcctgctgatatttgtatttgcctttaaacacaatcgtcttacctgtaatatcgcggttattcatgccgaaataagcttctgttttctttccccgtacagacggaatcaacaatgacgactgattattaaagagcacttcttcatctacccgaatatcttgattttcactataccaagccatcttaggcatttcccgcattggatcaaaggaaataatacgcgtaccggtaaaagtaagaagtccctttttactttgatcagactgcgcatataagttaaaagcaaccaacgcgaacactaataagccaactaatctgtttttcatatgtatcatagttttgttgtcaattcaaatatttacaggtttgtactctggacacaccaaaggtcagaaaaaagaaacactaccagagaaaatatctgttcataatttagcaatatctgtttatttcaaccctaaacacatgttttagcgaaaaattcgatatactcaacaagaaaacagagacagcttcatacgtttcggacgtaatctctattttataattcaaacataatatcatcttatctattatgagtatctttgcactccgaatatatacttaactatgaataaagtcaacggtttcctgtacggtctgctttcgtcggcctcttttgggcttatccccctattcaccattcctgccatgcaggcgggcatgcaattcgaatcgatactcttctatcgcttcctgtttgcgtgtatggcattaggcgggattctactgatcaacgggcaatcctttcgaatcagcagacgggacattccttccctgctcctgcttgcgatactttatctgatgtctgccgtcttcctgttctggggatataagtttatggcaagcggtgtagccaccaccattcacttcatgtatccggtactgactaccctggtcatgatgctattcttcaaagaaaaaaagtccggttggcggatagccgccatcgcctctgccgtgataggtgtctacttcttatccggtggaaatacagagacaggaagtttctcatttttcggccttttcatcgttcttttatcagcattgggatatgcactgtaccttgtcacaatgagccagttaaagatcggccggatgaaaggattactgctcactttctatgtctttcttttcggaggaatctttctctttatcggaaccagcagtatcagccatcttcagcctatcagagaatggcatactgccggaaatctaatcttgctggcattgatcccgaccgtcgtttctaatcttgcactggtcagagcagtaaaaagcatcggctccacactcacctctgtattgggagctatggagccggtaactgccgtatgtgtaggcatcttcctctttggagaagcattcaccacaagtattggcgtaggcattgcactgattatcgttgctgtaatggtaattatactgaaacgataagagcagccttcttataagattgttttccgtttcagcgggttaatttcagttcttcaataagattggcagcctttccatacttttccataatgaaaagcatatagcggacgtctactccgatacaacgctgcaagtccggttcaaatacgatatcactgctcatcgcttcccaattaccgtcaaaagcaagaccaagcaattcccctttcgcattgaacatggcactgccggagtttcctcccgtaatatcattattcgagataaaacaaacgttcatatctcccttttcatcggcatatctgccgaaatcaccggaagagagtaaagccagaagatccggttgaacagcaaagtcaatatcgcctgcgtgttcctttactttctcgaaaatgccttttactgtcgtataataactgaaggtaaccccgtcaaaaggagaatatccgcagactgtaccaaaactaaggcgcatggtggaattagcatcaggatagaagttacggtcggcatacatacgacgcacagcggcattgaacaggcgttcatcctgctctatttgttcggaagcctccgagacgctctgattcatctcatagtatttcactatcaggtcgaggcttaaagaaatggcagggtcctcgatgagattataggtcgtgtcacgttcaaggaagcgcttcagacccttcggagaagtgatttgagaggtagcatacaaagagtctacataagtctggacatttccgttatacaaggtgtctatttgcagatacatcgccggaaggtatttcttatccactttggaccggtattctttgagcatggccgcaaatacttccttatcaatagacagattcaggttatcgtatttctccagtaactttttcatgcgggtaacgaccaacttctcttcggcctcaaaatcgaaattcagtatttcgagtgccaattgaaccaattcgggaccattaatgaacgactccccgaaataagcaagggtacggtttgtttccctacgattattataattcagttccagagaagagaacagacgaatcagtttctccctttcttccggatgagactgaatccagtcccggagggctgcttctgctgcgcgcttcttttccagcactttcaggtgccggatggctttattcattcctatgctgtttttccagtagttggaactttcatcgtatttagaagcatacttgatacggatatccggatgacgatccatttcccgcttccaaatagcctgttttaccccgcgcacatcgatcatggcctgattaatgccgttcatcatttcttcgatcccatacgaagagagatagcgctccgtactgcccggatagccaagagtcatacagaaagagccttctttatatccatccaatgaaataggagctacgtattccggatgataagggacgttctcaggtgaataatccgccggtccgttctgtttgttggcataaatacggaaaacgctgaagtcacctgtatggcgaggccacatccagttgtccgtgtcccacccgaacttgccgactgaagaaggaggagcaaaaaccaaccggacatcattaaaatcacggtagacagaaagccagaactcgtttccggcgtaatacgcatcgacaattcccgtcagcgtagagtccttctctgatacctccatgccgattacattcatgacagagtcgacaactacgcgacgttcactttccgtatgagcatgtttggcagccgagagcacacgcttggtcacatcctccgtacgaagaaggaaacggacatataattcgggattcggcagttcttcaccaaggttgcgggctacaaaaccatccttcagataatcatgttctacggaagaatgctgctggatactgctgaaaccacagtgatgattggtaaataccagaccatcttcggaaaccaccactcccgaacagaatccaccgaaactgacaacggcatttgccaaagccggtttcttcggattatacagtttatttacaggcatctgcaaaccgagttccttcatcacccgttccgcctgtttgttcttgcgaaggttccccaatagccacattccctcgtcagcaaatgcctgtgacaggcaaagggagaggagaatcattgcggttagtctgagtttcatgctattatttttagatttatatattctatgatcaatccgagggtcattattcggtaatgagcctcaacttcttcgctcccacccgtgctttcagccatgcgctgattttctccttctcggcaactgacggatgtttgccaaatttcaaaacagccagtgtcactgtatccgttttcatcgagtctacccgtgtttccagcgagtgagcgatagaaagcgaagtgatagaaggataaagcaccttcaattcgggcactaaagtacgtcccatcgtatcgtactctttatattgagcgaggttttcttccagtcgggtaatctttttctgctgttcctgcaggcgttgctcgctgtttttataaaagtcctccattaccatggcacgaatggaagagacatctaccgcttcattattcatcccttgcagtacagtcagctttgtttcttccagcttgtattctttcagtttgctacgggcaatggatatcgaagcatccggaacttcgggaccgatcagaaccacgcggatgtctttatgctcataactgatcttcttatcaagtacctgcgtattctcaaagttcaactgctcattgataaaccgattggctgccgtctcataaaaagtacttttaatgatgccaaacgtcagataaacagccggacacattgtcagcacaacaatcagaatgatgtatttacgcaccatcttctcgcgtgccttatccacaaattccttacgctggaagtgcatcacccgcacaccgatgaaggtagccagactgataaatacagagttgataaagtaaagataaaaagcacccagaaaatagaccagattgcccgatgccagaccgtaacctgccgtacaaagcggaggcatcaacgccgtagcaatggcaactcccggaatcacatttcccttctctttggtagacagggctacaactcccgccaaaccaccgaaaagtgcgatgaatacgtcataaatcgtaggcgaagtacgcgccaacagctccgattgcgcttcggcaataggagtgaaaaggaaaaagatggttgccgtcgtcacactgaaagcagtcgtgatgaggaagctcttcaaagaacgtttcatcagctcgaaatcattcaaaccgacagaaagtccgacacccatgataggacccatcaacggtgaaatcaacatggcaccgataatcactgccgtagagttgacattcaagcccagtgaagccataaagatggcaaaaataagaatccacaaattggctcctttgaattctactccttttcggatagagtcaacggtttccatttcattgtctttatcctttttcaagtccaggtattcacccaggaacgacttgatcgcaaacttattccgttcatctgtcttcatagtcatttcttttttataatccggttaataacaggaatctgactcaaaggcaggtcccgtttgataatataagcaataaatagtagcagaagtactgtgcggaatgcaagaagcaaaactgtattatgaatcggcatccattcaccaatcagatacagaataatagctaagcctacataacaacctattccacgcaaatcataagcaataggatatttcttctgaccgacaaaataagaaagcaacatagctatggcatatccggtaaaacccgcccatgcgcaagctacatacccatatacaggaatcaggaagatattcatcagaacaacagtcagacaggctataatggagaaatatgccccccatctggtatcatccgtcagtttataccaaaacgagagattaaaataaatccccataaacatctctgcaatcatcacgatgggaactaccttgagtccctcccaatagtcttctgctatgatataacgtaaaatgtccagataaaacatgactgccaggaatgccagcaacgtaaagatgataaagaacttcattgcctgcgcatagattcgtttattatccttatccttacttttgccaaagacaaaaggctcgtatgcgaagcggaaagcctgcgtgatcattgccattatcatggctattttagtagctgcactgtaaatacccaactgtacatccgcttccaccttatcggggtagacaaaaggaaaaataatcttgtctccaacctgattcacaatgcctgccactcctaatatcaaaatagggaatgaataatataacatccgcttcatcagcaaacggtcgggacaatagcggaattcacggaattcaggtatcagcccgagcattacaacaaaagaacagatcagattaataagaaaggctacccctacgtcatcgcctttcatgacaacaaaataaaggatattcagcaagatactgactaatataaataagagtttcagtccggcaaacttaataggacgtttcttataacgaagataagcaaacggaatagcctgaatggcatccatagccagtacaatcagcatcatgcccagataccatggatgttcactataccccatcagccctgcaataggattgaggaagaccagacacaacagcaaaaacaggagcgatacgctccctaccatcaataacgaaacagaatataccttcttcgggtcgtcatctcctttattggcaaaacggaaaaagccggtttccattccgaaggttagcactacgagcaataacgccacaatagcatacatcttggtgatcactccatatcctccggaagcagcaggaagtgaaaaagtataaatcggtaccagaaaatagttcagaaacttaccaataatactgctggcaccataaatcgcagtgtcctttgccaatgactttagttctgccatgtttatttagatctctttattatcaatgaataatattatttcttttgtttgaacagccactccatgaaacccggataattaaatgcaggattccagctgccatgattgcaaccggggaattcgatatattccacctttgctccagcagctttcagtgctttgtacgcttcacgcgacccttcaactgttaccacatcatcggcatccccatgaaatatacggaacttcacttctttggcagccggcaaacggtccggattcaccgatccgcaaatgggaacggcagccgcaaaaatctccggataacggaccaccaaatcatacgtccccatcgctcccatcgacaatccgacaatatatatccgttttttatcgacttcgggcatggccaaataagtgtccagcaattgtttgagagtccgggtaagagaactcatctcctgtcctgcaggcatatctgccggaaacagtgatttcggacgctccgtataagcccagtagctgcctgccggacattgaggaacaagtacaaaagccggatacttctctctgttgacaggattcagaaacatctgtccgccatgcgtcagttgtctttcattgtcatttccacgctcaccggctccatgcaggaacaggaccagcggatatttcttccccgccttcattgactcggggcgaatcatccggtaaggcaaagaatctcctgtggaagagacaaatacgtccttctcataaccttgttgagctgataatgacagactcaaagagagaaatacaagtaagatactccactgtttcatactccaatcattcaataaaatcagttatctgtttaaacgttcctcaaaaagcctgctgttaattgtcgccaacactctccataccgacagccgtcagatcagactatcagtcattaaacaaggttttctgactgctatagaggctccttcccaaatgcttataggcaagttccgtcacttcacgtccacgaggagtccgtttcataaaaccttccttgatcaggaaaggttcatacacttcctcaatagtgcccgcatcttcgcccaaagcggtagcaatggttgtcagaccgacaggaccacctttaaacttgtctatgatggtgcaaagtatcttgttgtctatctcatccaaaccgtacttgtcgatattcaatgcttccagcgcaaactgagctatttccgtatcgatagagccggaacctttcacctgtgcaaaatcgcgtacgcgacgaagcaaagcattggcaatacggggcgtaccacgacttcgggaagcaatctccgatgccgcccgcaccgaacaaggtacgtccagtatggaagctgaacgccggatgatattactcagaacatcatcgtcatagtactctaaatgcagattaataccaaaacgggcacgaagtggagccgtcagcaatccgctacgggtagttgcaccgaccagcgtaaacggattcaggtcaatctgaatgctacgtgccgaaggtcccttatcaatcatgatatctatccggtaatcttccatggccgaatagagatattcttctaccaccggcgataagcggtgaatttcatcgataaagagcacgtcgttcggttcgaggctggtcaaaactcctgccagatcgcccggtttgtcgagcaccggaccggaagttactttaaagcctactcccaattcgttagctataatattggaaagcgttgttttacccaatccgggaggcccgtgcagcagaacgtggtcgagtgcttcgccacgcagacgtgccgccttcacaaagatgcgaaggttttccaccaccttatcctgcccgctaaagtcttcaaagcttaacggacggagcgcattttcaaaatcccgctcccgtgaagtcagctgatgttcgcgtatgttaaaatcttcttgttccattttcttcttgaaatgtaggagacaaagatagagaaatccattcattttcgatataagaaagaataataaaaacctccgcccactatccatttctcttttccaagaggaataatgaagaataaatctcaaaatcgatgcgatgataagatgccattcagtcttctttcggtgacttcattccctgataacaaggggatcattttcgatattaccaaagcgcaattattctcaaaggcatgagaaaaatttctcaatgcaatgagaaaaaattctcataggcatgagtattttttctcactgtggtgagaattttttctcatcacggtgagaatactctgagaatatagcaacctgcatctggctgtgtataaacacaataacaagtaattgctttccgctttttccctgctatttaatgaccataaaagcctcttcttcctaaaaataccgtatttacacattcttttcttaagcaacgcatcattctattgaagaatagagtgaaaaagtacacaagaccggtttcggtcttctactcttttgcccgaaaacaattagtttatttaaaacgtaataactacttttgcatcatctatatacacgcaatcgactatggttctaaattatatctggatagcattcttcgttatcgccttcattatcgccctgataaaagtaatttttctgggtgatacggagatatttacagctatcatgaactcaactttcgactcttcgaaaaccgctttcgagatatctctgggactgaccggagtactggccctctggctcggtatcatgaaaatcggagagaacagcggactgatcaatgcactcgcccgctttctgagtccggtactctgccgcctgtttccggacattcccaaagggcatccggtattgggttccatctttatgaatatgtccgccaacatgctcggactcgacaatgctgccaccccattgggactcaaagcgatgaaagaactgcaagaactgaatccgaagaaagatacggcttccaatccgatgatcatgtttctggttatcaatacttccggcctcatcatcatcccgatcagtatcatggtataccgtgcgcaaatgggggctgcccaacctacggatgtgtttatccctatcctgctgagtacttttatctcgactctggtcggcgtcatagccgtcagtatcgcccagaagatcaatctgatcaataagcctatcctgatattgatgggcgttatctgccttttcttctccggattgatttatctgtttctgaatatttcgcgtgaggaaatgggtacttactctacgctgatagcaaatattcttctgttcggggtgatcattctgtttattctgacaggcgtccggaagaagattaacgtatatgattcttttgtagaaggtgccaaagaaggcttcacgacagccgtacgaatcattccatatctggttgccttccttgtaggcattgccgtattccgtacttcgggagcgatggatttccttgtgggaggcattggttatgtagtcgatctgtgcggagtggataccagttttgtgggagcattgccgacagcgctgatgaagtctctcagcggtagcggtgccaatgggctgatgattgacacgatgaaagagatgggaccggattcgtttgtaggccgaatgagttgcgtagtacgcggagcttcggacaccactttctatatccttgccgtttacttcggcagcgtcggaatcagtaaaacccggaatgcagtcacctgcggcttgattgcagacttctccggtattatagccgccatcttaatcagttatttatttttcttttaaatcatagactcaattatggctgtaacttatcaaaccgaaggcgtcaagatgcctgatatcaaaaaacgggaaacaacagaatggataaagaatgtagctgcctcttatggaaaaagactcggtgaaatcgcttatatcttctgctccgatgaaaagattctggaggtaaaccgacaatatctgcaacacgattattacacggatatcattactttcgattattgcgaaggtgatcgtctgtcgggcgacctgtttatcagcctggatacgatacgcaccaatgccgagcaattcggggcagcttatgatgatgaactacaccgggttattattcatggtattcttcatctctgcggtatcaatgacaaaggtcccggggaaagggaaatcatggaagaggcggagaataaggcgttggcaatgcgatagttggcgatgcaataaaaagccattgaccggataaaattagcaccccgccacaatcactgcgacgaggtgcccccaagtatctaagagagatagttattgttccgttaacgcttgctttattttaaagacaagactttgataatgtgcccgggtagtagcatcacccgtatttactttgcttcgcagcaaactatagctatccattaccttctgataaatagccggattcttaaccatatccacacttccgagcgggttgagttcaaagccggctttcgtccaatcgacattatccgtaagcagttgtttctcaacttcattcaagtctttaaatgagaatggagaagatttttgtttcagcattcctccttctttcaacaacttttccacataagtaatctgcaggttacggtcgtacatattcaaccgggcaccggatatagttttcttccacacaaaatcataaatatcatccatatactcagcaaaagtataagcctgtttgggatataactcctcatacaaaacaagactggatgtaatgtatgtgaagaacaaacgattcataatgattgactgcaaagtacttggcgaataagtcggaccggtatactcaatcaccttcttgtcaagtacccattcgggtagttccatcatagtttccataataaacttcaatgcctccttctgttcagctttcggcacaaaacggataacaggcttttcgctgtcccgtctcggctcatcaaaataaattccaccgatggacaccatggcatgcagtaagtagcgttgcatctgcataatcacttcctgatatgattccgtcaggcgttcatattgatgatcatcttcataggtccattccggcaggtttttcatgataagtttcagattctttaggccatatcttcctgccttcacggcattatcacccaaatcctcagatttacaagaaggatcgacctcattaataaaaggctgcggaccgtatttgtacatcggatcattctctttctctttgatccacttgtttaaagtagctttctcatcttcaggagatgccgcatcaaatataggtttatatccccatttgatggcaaacttatcatatacacccaaaagcggaggggtcagagcaactcctttgtcttccggctgagctacataattatagcgcgtatagtccatgatggacggagttgtaccatacttctgagtgaaagtggccgaacggagcgagtctaccggatacgaataagatgcaccaaagttatgcatcagtcccagggtatgtccgatctcatgcgctgctacataacgtaacgagcttcccatcgtctcgtcatcaaacacagccttgcgcactttggggtcaacagtagcagtctgaacaaaccgccagttatgcaacaacttaatgatatttgaataaaacaagacgtcaccctgaatgatttcacccgaacgaggatcggcacaggaaggtcccattgaattttgtatcggagtggtaatcattcggtagcagctataacgaatatcatccggatcaaagttcggatcatccttcggatagtctttcgctacaatcgcattcttaaatcctatttcctcaaacgcaacctgccagtcttctattcctttctttatgtaatctctccacttgtcggggatagcagtatcaacgtaatatacaatcggcttctgaggttccaccaactcaccttgcttataacgttccaagtcttctggttttggttgcaaatcccatcggttgatgtaagtaagttcttgcaaaccatctttcttttcagtataaaaccgcttgctttcatcaaaataaccgatacgcgagtctccataacgaggacgcataatttcctccggcagcaaaataatattacgcgtcatggttacagtgaacggtcctccgtcaacagtataactcatcagcgtcttgatgtttatattcagcggaaaacacttcattcccagaatagtcgatttggaagaagcaagacttcccttcagtgcttttctcttcatcaatacatccattatattttccgaacgaaacgggctgaattcgggtacatccgttatgaaaagcgaactcatatcgatgacatatgctgaagagtccggtgaaagactttctatcttatatgcttcccaaatagggtctgagaagttgcgctgaaaagcagcatacatattggaagtggtatcacacaaattgcgcaccatctttttgtgcatgtagattttctttttatctgccgagaaagttaccagtaccggattgcgtggcatttgtccggcagctatatctttattgttactggtactcgatactctggacgcaatcataaaatcgcgtcccatcaagtctttaggaatttcgaaataatacttatccttaacgatgtgtaccttaaacatgccatcaatcgtcttggctcctttcagtagttttttgtattcggtcatactactctttgtggaatcttttgccgccggctgctctgtttccgcttttgctttcttctttttctttttaaaaatctgactttcggcattagcagttaccgctccggcagttaatgctcctacaagtaataaggtgaaaattttgttcatatcatgttgtttttaagttctatagttccagtttggacagatcgaatccgttttcaagcatagcttcccgaatcacatcatacttcttcttcattaccggatatttatcgcagatttcctgaatctcggcaggagttttctcaaagacgaaattcatccattgcgcaaggtcttcactctttaaaggagcataaatggaattaaaatccggccaatcttcatcaatataggagttctcagaataagtaatcaccccatacttataaaaatcgatttcattagggtccgttcctttaaaacgataccagttcgggtcgtacaatttcggttcaacttcttcactagcttcataaaaagcatctgaaatagtaaacaatcctctgacttccgacatatactttgcccaaaagctggcattcacatctgctctgattttcacaaactcctcatcggtcattgttttcaaagaagatgatacattacctaaagctataaagctgctactagcatagcaattcatgatggttgtctcaccataagaggccatccggacctcttcagataacaatatagaaaaaggtaaattcttctttaaaaaactatccgagtacaaattcaataataccttttgcaaaaactcaatcccttcatcaataatctcctgcttttgttcgggagcagttattttaattccgttattcgctgtaaagttgaatttataatcagcctcagtcggattggttataatcacagtctgatatttctgataaaactggtatataaaatgctgtgtcggatctgacgggtcatctgtcagaatgttatatttatccggttgctcaggaacgattaatgcatcttcatgataacaagaagacatacctgccaacatacaaattaataatataagtttcttcataatcgatcaattattaacaggttcactattcggacggtcgaatatttctatttccgtatttctctctctttcgctcttaggaatcggcaacacgtatgagcctttctctttcagttcgaagacatctcctgctccctcgttctcctttgaactgtaagtatgcgtaagaggagggcagccatatctgcgcaaatcaaaccagcggaatccttcaaacgccagttctctacgacgttccttacgtacggttgctacaattccgtcctcatcaacagctaacggccgagttcccggtttcattcgattttcacggagctcatttaagtcagcaagagccttgttcgtgttaccaagttcagcaaaagcctcagcacgattcagataggcttccgaaatacgtaaggcgttggcatagactgtagcagaatttttagtccacttaataggtgtataaacactatactgtttgttagtaggtctggtctggttgccgattgtattcttgaaataattcgtaagacgcaaatcatcttccgaatatagcgctagtaaatcatcagaaaccaccaagtttcccgtatacctgaaatcttctttcatatgtgtctcaagtgatgtaagtccgtaggataacaagatttctttgttagcaagagaaaagaaatagtggtcctttttttcctgaagtttgtaaagtggctgagtagcgaccttaaagaccgagtcacaataaagaatggtctcatcatatttctcctgaaaaagagcaatacgtgatgccaatagataagcactcggcaagttaggacgaaaaatagtcttctcacctcctatagccttaaaacactggatagccttattaatgtcttcttccatttgggcataaacagctgcattcgtggcccgcttcatcattttatctgataagccgatttctttattgagcggtacgcataagtcttcgttcgccgtagcaggatgataaggctttccatataaattagcaagcataaaatacgagaaagcccgcataaaataagcttcgcctgccaaatcctgacgttccgtatccgtcccgttcatggtataaagctggtctagtatgatattagtcatcaatatcttatgataatagactgtccatgcaacatccggcgtaagttcatttgaaattcccacttccggatttccctgccacgtataatatgcccaaacatattctctgaaatcattagaaatgacttgtggtctggttccatagtaacattggtctttcacatcgtctgtcatatattccagataaggatgaggtatgtctttttcattcgttttcattacctcaccgaagaacagttccttgtaatccttcaccgatctgggtatcatcaaatcttgtgaactttcttccaaaaagtcactgcacgacgataatgtgcagataaacaatatgatatataaattgtactttttcatcatcattcattattaaagagtaatattaaagcgaagtgagtaagaacgctgcggtggtatacttcttgagccaaatccaatctgttcaggatctctgcccttcagcgctttatctttaatgacaaatacattacccatatcaaagctgacacttgctcctttcagatagacaggtttcaaccattcacgtttaaaatcatagcgaatagacatcgaacggcatctgaggaaactgcctgaaactacacggatatcactcttattatacatatcccatccattatccgcaatacgataggtcacatccttatcgttgatctgcaaactcttatccgataaaaccggtataatggttctgtcttcatcacccggctctctccaacgattcacaaattcactggacatattctgatccggataaggaagccgctgtccggaggactcatacaaatcattcaagcgcattttattgccaaagctgaatgagaacaacgcattaaatgtaatattcttatatttcaaataagtagagaatccaccggtcagatcgggttcacgttttccggaaagaacaaaagcacggtcatacatctcctgcaaagaatgaaccacagcatttccttcttcatctttctcattaatatccttaaatgtaggaaaaccctgatcatccagtttatcaaatttataagaatagaaactatttatcgcattgccattgctcactaatgttcctgcaatatagtcttgccaagtgatcgctgagttcccggcattcaacactttattgtagtttttacctgtattgaatgataaactccacatccagtcccgggtctgaatcggaacaaaagaaacagccaaatcccaacctttattctcaacatcaccatcattaatggagacacttgacgcacctgtagaaggagctacgtttttcgtaaccacctgatctactccctttttgtaatatacatcaagcgatccatagattctgttattccagaatgcccagtcgattgcaatattatacgaattggttttttcccacttcagtttattattcggcagcttatacaatgttgaaatatactcctgtggcattgactccaatgtccccaaactagcaatcaagttaggggtctgatccggatgcacgttaccttgtataccgtatgaggcacgaattgccagatcattcaggaaatcgacgttcttcataaacttctcattgataacattccatcgtgtagacacagaccatatcggcagaaaacgaacgctcttgctctgaccgaacttattagaaccgtcagtacgtatattgaagttcagaatatagcgactgtcataaacataagcagccgtagcatatagtgaaatcacattattctttgtatcagtcactacatccggatgactctttaccaaagcaccatatcttttccagactgtcgggtcaatatcaacaaactttttacctctttcgggcaaataaccatattgcgtagagcttaatccgtcatattttgaagatctgacttcttgtccgatgcttccggaaacttcatgctttccgaaactttgcatcaaagacaggctatttctccatgtataagaagtattacgtgtattggtcgtcatcaattctcctccaaacggaagcagacaatatctttctgcaaattcggaatcttcaatgggattcggcaacatcttcccatagggactttgtcgcatagaagaaatataatatgattgttcatctccccaattttcttgtgtcacgttgcttctggacagtcccaatatggatgaaaatctcatccatgaagcaaccttccaatccagattgacagctacatctatagcggaattatcattcttgtttcctgtatgattcagttcgttcatgatattgtaagacaatactccgttacgtccagcctcattcgcatagaaatacaactcattagaagctgtccgcagtggaatagcccgtgaagtattataagcatactcatacacatcaatggaagtatgaggatgttcggctttggaaagcgaaccgctaacctttaatcccaaatgtatattccggttaattctagtatttattttagccagtacattataacgttccagcccttcccctatcgtcacactgttattattcgcatatcccatggacatataataattactccggtcatttccacctgtaatggataccgaatgctgatgtgtaaatgctgtacgaaacagcaagtcataccagtcagtatttaatcctttcagggtcttcacctggtttaagaattcctgataggtaatatctttattccacagatgttgcaatgccccttcatagccaatatccgaaggtttgtaacttccgaaagataatcccctctcctgcatttcgatagacatatcaattctgtcggcagaattcatccgaaacattttatcgtaagtaggaggagctgttatccccaatgtagcggtatacgagatactcggtttctggctttttccttgcttggtagtgaccacaataactccattggccgctttgataccatagatagcagtagcactggcatctttcagaatatccacacgttcaatatcttccggattgaccgaaccgatggcatttccgatcagatttatcttatccggactgttcaactcttcagtagagatattgacaggttcttccagaataatcccatcaactacccataccggttctctatttcctgtaatagaagaagatcccctgattctgatcttaggagcagctcccggagtagatgacatattcatcacggcaacccccggcaggcgtccctgcaacattttgtcgatagacaaatactctccaccaatcagatcagctccctttatagaggatatagagcttgccagcttgcgcctgtcgatctcctgataacccgttactacaacttcatcgattgacttcacatccgatttcatcacgattgtcataggtttagtaccggcaacttttacttcctgtacaatcattcccaaatacgagacaatcaggacaggctctttctgatggaataaattaatagaaaacttaccttcattatcagttatcgtcgaatgttccgttttagagagttttatataagctcccggcaagggcaaccctccctcatcaaccacaacgcccgtagccgtgcggacattctctttaggttgctgatatacaatggttacaatatttccttctatctcataactgtatcctgtatttgccagcactttgttcagcacctcactgataggctggctatcgctctgtatagtgatacgaggcatatttttcacttgctccgtactataaataaagttcagaccagtctgtacttttacagcatcaaaaaattctttaactgttgcagatttaagatctaaggataccctcattgcattagattgcgatgcagccaacaccggtgtaaacaacaaggaaatgatacagagaaacatgataatgcgttctcgagctctctttttttgcatgtagtcctcctttttttaatagtagttaatatgtttatttctttataattatggtcttcccctgtatttccatttccagatgagtcacccgctgtatcgctttcaatatgggctctattgagccgtagcgatcaatatctcctgtaaaacgtatcttcttggtatcttccgattcgaatacgatatctttgctgtaccaacgtgatattacattcatcagactctccaaagaacagttatcaaaaacaaagcgtccactgttccatgcggtatacggctcgatatccactacgctaatttgtacatcttgcgtatcagcttgaagaaccgccaattcccccggttttattttatattcccctccctgattaggaagcacacttacagaacctttcaccagcactactttcgttattccgggcacatgtgtatttacattaaaagttgtcccgtactgcttgaccactccattcgccgtaatgacacggaaagggcgtttactatccttggttacctgaaaataagcctccccatccaaatagaccgtgcgagtggtagtaccgaaatgtggtggatatttcaatgtcgtattataattcagatgcactctggtcccgtcttcaaacgtcatccagaattcactgtcatcataagtactcaacttattattttctgcaacaggaagctcttccggttcgttcatatcagtcttaggtactgacggctgagcaacaggcacttgttccaccgaatcctgtaatggcttagcaggcactgatttcaaatccattttctgtccatttgccaaaaccagagttgccttttgtttacccatcttctccgaccggatcatagcaatacgaacttcatccgaaatcaccggctgagaatccatcagccgcaaagtccaaaaccatattgcaaaaccaattatcggcaataagaaaattgcagcatagcgtcctattttgatccaacgagcagaacgaatagagaaatgctttttctgaaacctttcccaagcacgtgcttcatctacctgagcaaactgtttatacctgtcaatcaaacaagcctcacgcatcagacgatcatagttctctctattttcctgagaactatcaagccatgactgcaactgttttttatcttcttccgaagcgtatcccagtaactgatcatggataatagaatttatacttcttttacgctttatcatattctttcaggttatttatagtaaagacgactaagaagaaaaaatgagggacaggattctgagttttttttattcaaaagatactttatttatttagaagaccgttctttttgtacaataatcaagaagaacaacgaacattttgttcattgcaaacaggtgttaacaagtaaagcagattgagtgttatgcttctttttagggaagtaacatttgtaataatagaaaatgataggaacctagtttttttctaaggaaagacattgctctcttcttttgagtctttacagtttcaagagaaacatggagtgcagtggcaatctcctcgttcttcttgccttccatatacatcaaaaaaacttccctgcatcgatccggcagcgcatcaattgtctgaagaagctggcgataaacttcttcactaaagaagccctcttcctcctcttccatcctaaatgtagtggaatgactatcaagcatcttctgaagatagttgccttccacatccttatgtttcaaataatccaaggaagcatttctgacagagttatacagataaaccctgaatgaagccagagaccggaaaaacatctttttctcccaaatagtggagaataactcctggacaatatcttctgcagattctgaatctccgacaattgttattgcatagcaaaccaatgctttataataattcttataaagcagtcggaaagcagccgcatccaacttattaatttgttctatggaaatctcattgttagtcatttcgggagttttgcgccaaaaatacaaattaaataataatgttctatacagaaagactgatatttttctctcggacaatctagttgtatggtactttccaaaagatatccgcctataaaagattcacccggatttacattcgacaatgtaaacccgggtgaaaaatgctcaatattgcatagaagaaatctttaaaaatatctcttacaatattgttttcatagagacaaattaattaagagagagtttatgtaatagagatttattcaatttccgtagctttattaatgcggtagatcaacaggtcataatgagaacgatctgcctcaggcgccgtcgaaattgctttcttgagcatgtctttcgtacgcatcaacaagtcaaaatagtaagcagctatttttgtctggttggtatagatcggtggaattgaagagaagcctgctacttcttctgcattttgcaatgaatacatcttcatatccacctttccgccatttctcaaagcagccagattgatctccggtttgccggtagccgcaaatcctgtttttgaggctttgaaactaccaataggtgcagttgctgtcgatgttgaaataatactttccagaaacgctgtctgtagtgctctctcgaaattctccaacggacgatgcttcaagacaccttcccaaacaattccatagatatcatccagatattccgaagcagtatatgctgcacccgggaagcgttctgtacaaacctcgacataaggcagacgtccgaaaataccattaaagatatccaaacgtaaacggtcagccttcttatctgaaatttcaaattcattcaaatgagcggtatcgtccacccaatccagattctttgccagttccaatgctttactcaaagctgctttctgtttctcacgatctaccattgagtaacttggtatcgcatccttctcgcgaatatcattcaagtaaataccgccaatataactcagtattgcataaatacgcccgctcagtctttcactaagggcagagtgtacacgtctgcgcattaaaaaatcgcggtcttccttggcaaaccaactataatagttctcaaatcctttgcgaacattaggaagcatatagtcgaatgatttcaaatggtcatctcccagacttccgcgactattacgaggatcagaatcaaaacgtgactgattacgtatataagcataatatgggtctcccgtatgttcacgaatccagctatccaatgtctctttttcttcctgcaatgaagaagcatagataggttgatataaatatttaatcaccagttcgtcatatggaccaggctttgcattaaccagacacactccattacgaacatcctcctccgtagctacgtcattaatgattacgcctcccataacagaagaagcgagaccatacttttgagtaaagcttgccgaacgcaacgaatccaccggataagcacaggaagctccccagttcattgttagtcccagtccggttcctacagcctgagcaatagcagcctgaatcaactcaccctgtatctcctgcgggaaaacagtagtacgcacacgaggatcaatagcaacagtggcccctatacggtcagcatactgaacactgatcatatttgcattaatcagaatagacgcgttcaatatttcaccggtacgtgtatctgagtgtatcgttgtctgtgccgaattcagccaagaagctgaataacgtattgtcatacagtcaaagctgtttgcattgaacaatgtgtcattcttcgggaattctttcacacaaataacatctttaaagccgatcttctcaaatgccttattccacgattccgcaccagccttgatatacggattccatttgacaggcatcagactgtcgatatagaacaccagttgtttgactggccgaaccagctcgccacggcgataggcagcagagtcggaaggctcgatacgccaacgttttgcatagcgtatactcttcacttcctgagttgcccctgaataatcacttttcaattgtgtagtcaatcccaaacgtgagtcagccaggcgaggagtcatcggctcctcgggcagaatacaaagcattttagtgacgaccgctgtcaaaggtacgtctttgtacatgttgtatgctcccatcagcgtatggtcgacagtatatgacaactcttcacgtacacttatatgattatctgaagccgatacacccaaaatagcagatttatccgattgcagagaatgatcgcgcgacacgaatccatagtatccgttagccgatgtcgaagggaaaggtttggtaaaagcagatccctccaaaaataatcccttcatatctaccacaagtgcagaactatccggagtgcaagccaataccttaaagcttttgaaaatacccggattatgcgcattgtccaacgcacgtgcgatataagcatcaccactggtatttaccggcttactcaataaaggcatacgtgccacaagagtagaatcgatcatctcaaaacggaaacgtacgtcggtaccccctaactgtccgggagctccttcaccaccgtcactcgtattttcaatagaagaagcaaacagcatctcacggcctaacatggcaaccgggaactccacatacactttcccttccaccttatgaatagtcatcagcccgtgtgctgtctgaactttcttattcttgaacagcttctgatatggtgtcagattttccttcttatcttcttttttcttctttttaaaaggccagaaagcatttccttcctgtggcaggcaacatgcaaaaagaagcaataaacaaagtatcttactatatctatttctcatacttcctatcattttaatgcctggtcaattttgtacaacaataagcggtagtggcgttgtgtatcagccgaaccggtagaagcacttgctgcaaccagactacgaaccttcttcaactcaccgtagtatatatgttccatcggttcgatcggtgctttcagatctacatcatcatcaaatccactgatttcctccaaacgggcagcctgcatctcacgaggcttgttattaaaacatcccataaattcctccgagatgattccgaaacgttcgcgcgaagcggctttcagccattcgggcacttcaatgtgagcatacatatctgcgatacctttacgggtagcattctttgcaacccctgcaaccgaaccttcaatcagcttcgtcagataattcatctgcaaacgcatttctgtttctgtcaaggttcttccggcgcgggtaggagcccatacaaaacgttctatatcggcaagatattctttctgagtataaggagctgatgtcgccttacccgaacagatagccaccgcaccacaacgagacaagataccatcaataattgcatcttccatctgcatggccacagaagtgcggatagggaattctttcagtgtttcgcgtgcatccagccacgaaaggtccttcagttcattcaataagaagttcaaagcctttttttgttgttgcttcgatacagttttaaagcttgggcgctgatcaccgtcatagcgttcgttcagataaataccaccgatatctcccaaaacgaaagtcaaataacgtacataagcatatacaatttcgtcataaacagccgtgcggaactcaaaatccttatccttatccgctacccaatcattgatatgctttagcagatattgcaagttgcgacgtccatattcagaagctttcaccgggtcgtctcccaaatcttcctctactgaacttgggtcaaaacgacgtctgaattgttgtttaccatagcgatatttaacatctccagacttctcactgatccatttatccaagataggaatttcttcctctgccgttttagcctcaaagatcggtgaatacagccaggagatagcgtaataatcatacgctcccagttccggaggagtcaaacgcacgcctctctctttatcacccggttgagcaatataattgttacgggcatagtccataatagagtaagtcgtaccaaactcctgagtaaacttcggatcacgcaaagattctacagggatagaagaagaacctgccatattgtgcatcaatgacaatgtgtgtcctacctcatgcgagagcacataagcgatacaatctcccagtaagtcttcacgcaaaacaacatcacgcacttcctcatcagcaggggcagtctgtaagaagcgccagtactgaaccaactgcacaatattgtggaataccgtaacagatgcattaatgatttctccggaacgcggatctatccaagaaggtcccatcgcattggccactgttgacggagcataacgtatacaggaatatttgatattctccggatcgaagttcggatcatctttcgggaaatcttttgcaatgatggcattcttaaaaccgatcttctcaaacgctttctgccatacttcaactcctttatgaatatatttattccaacttaacggaaaagtatcatcaatgtagaaaacaataggtttcttcggttctaccagttcgccacggagataggctgctgaatccgatggctccagattccatctgtgagcaatgtgacgagtacgcaacccacgaccttcggaagcaaattctactacagagtgttcaaaaataccaatacgtggatcagcataacggggacgcatcggttgttcaggcaacagaatgaagctacgattcataaccgcagtaaacggcattttcttcactgcataatttcccttcatacccacgctgattttgtaggtcagtaaagaacgtatactcacattatcctcaaagcctttgactccctgaataaatgagctttccttctcaaaatccttactaatatcggctcccatcatctccatcattgaatatggtgagaacggagaaagattcttcttgtcactcagcagatagtctgtcatgtcaaataccactgccgtgctatcgttattatatgctttgatctcgaatgtttcagcgattgccggcatagtactgcttaccaagcgcttcttgatttcacgatcttcagagaactgacctgcctgtacacgacgcaatgtaatagttgagtcgcgttgcacaaaacgaatcagaaaaggatcacctgacttctctcctacacagccgaactggttatcggtcgtttccacgatggtagaaccaagcagaatatcccgattcatcaccttaatcggcaactcaaagtagattttattgtccaacttgtgaagagtaatgaaacctttagccgtggtgactttcttgtctttaaacagtttgtcgtacttggtttccttcttctctttctttgtagtcgcttcggtagaagctttcttcttgtttttcttcttggccacagcggggctgatcatagccccgcatagtgcgaccagaagaagtaaatacagttttttcaaggttttatcatttttaagtttataaccaatcgaaatcatcatcccatccattgcctgtattaggcttataacgtacctgtacaatacgtcctaaatctttttcgtgatatagaacaaatttcccatcaacttccgttacttgaattgtttgtcccttatttatcacgtatttatcaatagtatattcatcagaagtattgtaagtatatcctttcataatataggcatctccgctctccaaaccaacaatgatatattgattattgtagaactgtgtatcaacagaagtaatcgaagagttaaatgtagcacacttaaataacatattttctttcagataatacagatatagggcattccctttactaataaaaaggtattgccatgtatcttgataacggaacaatgagaaactattctttgaagtaccatcaattatctgtcccaactcagcaggtgcttccacctgcgacacatacgttgtagccaaactagttactgtagtactaccggaaaagtctcttaccgcaaacttctggatatagaatttatgagactgcttatgctctattactgcaaaatacatcatcttaccataatcataagagtccgattcacacgctcctacataatgtactgtataatctttcatattatctaaacgagcatatgtaggatgatttgtgtatgtcgtttcatctacattcaatgttagtattttgcccgaattaaaagttccattagagctcagtttatctgttacgtgtaaatattgacttgaattcttatcatacaatagcaatcctccatggcccgaaaatggagcataagcaatcatactaccgtcaactttcactttaccttctgcatccgatgttagcggagtattgataaaacggctcgtattaaaaagaagattactctcttttacacgtgtataaattgtaccgtcctcgccgacagccatcgtcagacactgcaaatcaatcactgcttccggtactaaatcttgtggataaccctccaagaacatttgtgacaatgctccttcacgctgataactactacctgatacgtctacagctccttgcccacctttttgcgctatccatagccaacttatacctggatcctcaccatcccattgctctacccaatgaggatatatcgaaacaggctgactacctaacggttctttatttatcattcgataaatatcacgagtaactacaggtttaagtactccctcttctgtttggaatttcataaatgtcaacatactattaccatccttttcagaaagaataacccaaccatctttcacatatggagaactaattgagattgtcgttgatccaaaataagatactccagtggacttatccaatactgccaatcgcagatctttatttttggctaccgtatccgccacccattccaaatctttagagtgagctatcacatgtccatcatagctccattcataagctaagttctgactttcgcgtcccaaagcaaaagttagttccggttttgagataaccttatctcccaaggaataataagaggtttctgttgaaacagagacttctatatcattcatttctttataatcataattccccttatcatcataacaagatgccatacctaaaaggaacataacgataaatattattttcatattcatattcaagtagtctatttattaattaataggcacagtcattggaaattctttaccatcagcatccacatccatcacattattctgtgcaatatagcgtttaaatgtcaatgaataagctctcttctcagccgtatttaatgccccgaaattagttactcctgtacacttcacaaattcttcatatttttttctagagtacgtacctaaatatactcttgtgacctgagtagtccaccactctggtttacttaccacattattaaatacaatttttattttttcatattcctgcattgttccttggaaatattcattcggaaccagtttcagacacaattttacattctccttcaaatcatccgtcttcaccaaagtaacttctagcgtatcattagacaatcctgctccaaattttggattaattggtaaacgaaaattctttgaagccgcatttggggtaggatcttctttttcattctcctctaccactactacactatatggagtatcttcgttgagaggcttaccaatcaaactcataccaatctttaccgttatttcttcgctcgtcggataattattgaatgacacctccatatatccattctctttatcgtaatcatttgtcgtatttatcaattgactaaaataaagatactgttctccctgatagggttttatttcatcctctgaacacgcccaaagacaaagagagattaaagcaaataatatattttttttcatcgtttcttcttttgattagcaatattaaatgtcttcattattcggtttgtcaaatacaaagactacattatctttcggtttctgatccaaacgtttatactgaaagaacatctgtccttcacctacaaactcacgacgcatttcttttatcaaatgtgtatgaaagacttccagagaaccaatacttgatgctagattagtagtactaatacctctcgcataacgtactttatctaacatctcacctgctttagagaactcatctttataagcaaaatattcacccataatataatacatctcgctcaagcgtatagccggaatcatgtctgtaccggaagtaccttcttttatatcatatttaaaggaatacttaatatctcctccatcccagtccccaaacaaatcaagattacgatcgtcagcaccagcttcatcaccaaaaagatttgtagtatttacaactaataccacatcattccctttagtcatatacggaagataatcttcatagcaagtagacttaaagaaagtcataattatactattataatctttccgattagtggtcaagctattagagaagttaaaacaagaagctgtagacgtgcttcctgttgaataagtggcatctactacttcttttgcttctttgtaagcattaccatattcgccagcccaacaataaacacgagctaacatcgctgttaccgcataataattcatacgatatccacgatacgcaaaaaatacatccttagccagttctccactagtaccactattaacagccaacatacgattttcggtggacatccaatgtttgttttctttaatagtatcacactttgccaacaagtcctttgccgcttttaaatcattaactatttttctcaaaatctccttattgttttcataagaaggaacaatagtaggatatacatcaacataaggtatataggctttgccatcgtctttaagcatagaaggagcaaacatccgaagcatatcgaaatggattaacgcacgcaatcccaatgcctctccccatatcatattcttctccaactcgtcttctgcaaacacagaaggagatgcttcacttacattagcaatcaagttattacagttagctatattattataaccaacagaccaaatgctggaaataatactttttacatctgaatcatcgaatttataattagcagctttataataggacgaggtacttttcatatagctacttcccgactgataatattgtgctattacatccataaacccccatgaaatactcttaccatacattgaggaggttcccaaattcaaataaataccattcaaagcgttacgataaccatcgccaacttcgaaaagtttatcgccattgacttgattacttggtgctacatccaaccaatcactacaacttgttgtaaacaagctagctgtcagtaatatcattgcatatactttcttcatattattcatctactctaagtattgtttattaaaaactcatctttaccgaagctgcaaaagaacgagaatacggatagtccaaaccacgctcggcacgtacagtagaaacacggaataaatcattacccgacaattctacacgtaataagccaatacgtgcttttttcaaccattctgcattaaagtcataacctaccgtcagagaattaaatgttaagacattgtaatcctgaataaaacggcttgtaggacgagttactgcaaccactccatctgtttgcaaacgtccgtaaggagtacaatctccagggttctgccaacgtcctgttaatactcgacgatccacattgctactttgtatatatgcattctcaaccttacttaccaatgttgaattgtaccgttgtcctccaagctcatacataaatgttgaatatacggagaattgcttccaacgcatattaaaaccaaaggtaccttgaagtttcggctcttcatttccaattacaacttgatcagctgcattccaatcgtaagtaatcgttccatcaggacgaacaaagatttctctaccgtctgccggattgatacctaacgactttacaccaaaaatagacgttaaggacccaccctctacatactgtaaataagtagcactatattcggctttacctttattaataccggaattataatcagcatatttctcttgtaccctcttattatactctttcaggctatcagaaatcttggttatctcattcttattatgagccatattgacaaaggctgccacataccaatcctttgaattcaggatagtgcttcgcaactgaatttcgacacctttattcattacttcaccgatattgtctttgtatgaggtaaaccctgtagaactaggtaaagtcacactgttcaccagatctactgttttcttacgataataagaaaagttcatctgaagtaaacctttgaacatgtcaacatccaaccccaaatccatattatgcgtcttctcccatcccaatgaactgttccccaatgccatcagtgttgcacctaaacctgttttaaaccaattgtctgtgattacttgataaattgtctgtgcctcgtagggagaaaaatccaccttaccagtgataccatatgttccacgaatcttaaagcgctccatccattcaaattgtttcataaacttataattatgcagattcaatccgagaccacccgaaaagaatggggcaaatcgttgatcggaaccaaattccgagtttccgtcaaaacgaagagaaacgtcagccaaataaatattatcgaacgaataattgaatgttcctaatgcaccgaacaaacggcttttactatctgagtttactggtaatgtaggtactttgttcgcataccccggagaagataactccccagaaggaaagcctttataagctataccgaaactatcgccagtacttgaagtagcattaatcccaatcaagaagttcaaattgttcttcttaatatttcggttatatgataaagtagccgtagcgtcccaacttaagctattggcagtagcaacatccaactgtccagaaatcacattgttagcatttagcggttcagaattcttttttgaacgaggatctaaaaattggcgtgaatctgaatttgacttcgtaacactaaattgtcctttcagtaaccaatagttatctatattccacaataattcagtattattaatcagttcccatgatttgctacgatcataacttttcaacgtagcttcatataatggattctcttctgttcctccagtccatgaggtagtggtttccaaataattcccattctcatctaaatactcatcatatggcaactttgaagtataatcagaaaagcttccataaggagattcttcagatttagtataagtataagaaaaatagttttttacctgaaaagcaccgaaacggtaagataaagataacccgcccgacatacgatcacgataagaacctttcattacgccatctcctgaattgtaagaaaagtcagctccccaacgcaggtcatccgttcctccatctagatacaaactatgtttatgattgaatacagtacgaagcggtttcgataaccaataggtatctactccacgaactacattattcaactttctattatagatttgatccaatcgattttgctcacttgcaccggcttccggcttagctttaaacatacctgccgcaacctctgtttcaagcttttcccgcgcattcatcatattataatcggttagatcaggatattccaatgttccagtaaagttataatcgatattgactttaccagctttcggagttaccgttgtaataataactacaccattagctgcacgagaaccatacatagccgtagcagcagcatccttcagaatagtaatgctctcaatacggctaggatccatatcatacaacttctgcacactaatctcaaaaccatccatgataaaagtcggaagattaggattgttcttcaatgatgttttagaaaggctttgcgcatccaactgagtagttccaataccggaacgtccacggatatataactccggaacattattcggattcgaacctgctaaattattttcagcaatacgaaaagaagggtcgaacgtttgcaaagctcctaatacatttgttttggaaaccgacatcaactgatctgccgtaaccgtcacagaagtacccgtaaagctatttttactgatctttgcataaccggttaccaccacctcttccaattgctttgaatcgggtttcaacttaaaggtatgcactttatcaagattgagcttgccagtatgtatttccaaagtttgcatgcctacaaaggaaagacgaattgttacatctccttcgggaagtcctaaagaaaaagcaccgtcggcatcagtcattgttccgatatttctttcttttcccagtatcagcaccgtcacacccggcagttcgccaccctgttcatccaccactttaccttccaacgtacgtgtcttctgatctttcttcttgatgaccacaataccatctttggtagcataagtgaaacctttaggtgaaagaacgcggtccagcaattccttccaaggctcgttggtagcttttacagtcaccggttcaactcctttaaacatctgagagttataaagcatgttgattccagctttctgttttaccgtgtttaaaaatgtttccatcggcacatccttcaaatcaagtgtcactttcttctcatcaggtggaagtgcccatgcactgagaaccatactcaatgcaaaaagacatagcataaagactcttctttttttcataatttttaaatcaaaactcaatattactcattctcatatatcaatatatttcttccgtttattctatagtagatatcgccggttagttctaatgcattcaggaaagtattgatcgtgccatatcgctgcaagtcaccactataagtcaggtcgcgcagagactccttctcataatagacatgaacatcataccagcgctcgaaggttttcatgatatcgcccagccgtttgttgttgaaaacatatacaccttgtgcccagccgatatattcattaacatccaccgcccgcttttcaatgccacgggaagagacgactgcctgttcacccggcgccagcgtaatagtattctgatcgggtgtcgagaaatttactttcccatatacaagagtggtatagcatgcatccgcatcattataagcattaatattaaatgccgtaccaagtaccgttacttctccgaaacgagtccggaccacaaacggatgttcctcatcctttctcacatcaaaataggcttcaccttccagtgtcacaattcgccgctttccaacaaaacggaccggataaagcaatttagaaccggcattcaaatgaacagtggttccatcagcaagaaggacagtattctctcctcctcgtggtataaccagttcatttgacttcaccggactttcatcgacgttttcttcttcgtgttgttgtgttgtgacggtcggtcgatatgacagcacccctttattgtatttcacctggacgccgtctactattacatttatatctttcttttgtacatcaatagtgcttccatcgggcaaagtcagcactgcctgtttgctacccggcttgatttgcgcgatacgtgcctgggactcctccactgcctgataatgattcactgcataaaaagaaattcctactcccagtactaccatcgctgcggcagcataccaccatgtccggatacggtggatctttccaccggacgagttctctttttgttgaatttgttgaaggaaatgctcgtaagccttttccgatgaatattctttatacttattaaaagcatcttttaattcctcactatcctgcaatttctcatacacggctttcagttccggatgcatagataaacgttgttccaacacctgctgctctttgtcgcttgcatctcccaaaagagccttttttatcaaagaggcatcttgatatgtgttttctaactttttcataattttatctatttctaatgaggattttatctttgctttactataattatacataacgtccataaatgggtgacaaaaagatgattattttttatgagatactctccgtacgaaaacagaaaagaacgaaaaactatcattatgacattattcagcaacaaaaatgacgtatttaacaaatcattcccttttcggaatcaaaattcagccatcaataaatgacaattaggcatcttaaaaaatatttgtttttttccgttaccgctattaaaatgatgtattttttagcttttatcaaggagtttgaaactcatatttcatcatcatccgtcactttcggacttagctcattgatatacaatgcgataaaagtgacgagaagcagtgacgacagagtgataacaaaaatatttcaaattttatcgtcactttctactaaaagaatgacgcgctgtacttcataaaaaggtccttgatttaaccaaaaatgcctgctttattaatctattcccaatgccggaccaatgtaataagacaccgacaagacttcatttcacatacatggtcccatcgctctgcagacatgatcccatggactcacgtacgtaatccgaatggtttacagacatggaacgaacacatatagcttactaaaaatgctaaccaagctttgtttacctgttaaacataccggctcatccacttaaataagccacatcacagtcacttcacccccacaaaagcaaggatgcacagcccgttttttaataaaagataagagtaagaagtacagaataactggaatttgccagcttctcgcgtaagaatttatagctacggcttttctgagttttaaccgtattgatgctaactcccagccgggatgcgatttcgtcccacgaatgtccttcaattctcagcaggatgatacggcgttgttcggcaggaagctcctcgatatagaaataaagttgtcggatagcttcttctttcacagtcaaagcatacagcatttcctcgtcttcaaaatcttcttcctgaggcaagccattcaatatagaatcatgaatctgatggttgcggatatacaacagtgcattattatagcaggcacgataaagataattagtcagctcacgggagtcggaaaaagtacgcttaccttcccacacggatataaacacctcctgaaccagatcttctacggcatcggtgaggaacaggattttctcgacatatgagcacaaggccgcataatagcgattataaaagtccctccagattcccttatctttctggttgacacctgctactatcaaatcatctttatcgctcatacggcaacaagattaatcaaacaataaaagactctcttcaaattactgcaaaaactggttataatagatatgacttacaaatatatctgttttttcagtatgtaagttcacccctcatataaaaaaatagaataaaggggcataaaataaaaaaagagcgaataactccgccccacctaaagaatcccccataaatgggattcttttttctgcatctcaatttacctgttacctgaaaactacttttttctaatacctaatcaaaacaatctttttcctaaaaactaatcttaaaatctaataccttaattttataaactaatactactcttttgttattacctttttctaatacctaaaaatcttagtagtttcacaactacactgcaaaggtagaggtgttttggaaaacaacaagaattcttatgctaaaaaacatgttttaccttatttttttgatttatgtcaagagaaagagtggaggttgggtataaaacatacatccgaatgttgatttgatacaaattctgtccaaacgctccgttcgtcttctatttcatcacacggccgcgcactttttcaagtgacaaaaagtaagcctagaatgtcgaaaaagagcatttacatctctttttgaaaggaatcgaagccttaacacaaaagaaaagaagccaaaaacgttacatcttgcatatttccaatccaaaattacggcgtttttttgcgcccgccccgcctcctcctcgaaatttcggaagcaaaaaccggcagaagatacaactctcgcaacttttccgtaactttgcagcgtttgataataaataaggtagaatggattttaagtacgatgtaattgtaattggtgccggacatgctggttgtgaagcggcagccgccgctgcgaatttaggttccaaaacttgtctgatcacaatggacatgaacaagatcggacagatgagttgcaatccggcagtaggaggaatcgccaaaggacaaatagtacgcgaaatagacgcactgggcggacagatgggattggtgacggatgaaactgctatccagttccgaatcctgaaccgctcgaaaggtcccgccatgtggagtccccgcgctcaatgcgaccgtgccaagtttatctggtcatggcgtgagaaactggaaaatactcccaaccttcatatctggcaggataccgtctgtgaattgctcgttgaaaacggtgaagtagtcggactcgtcactctttggggtgtcacattcaaagcgaaatgtatcgtactgaccgcaggaacattcttgaacggactcatgcacgtaggccgccaccaattgcccggcggaagaatggcagaacccgcatcttaccagctgacagaatccatcgcccgacatggcattgcctacggaaggatgaagaccggcacaccggtacgaatcgacgcacgcagcatccacttcgatctgatggatacacaagacggagaatgcgacttccacaagttctcattcatgaataccagtacgcgccatttgaagcaactgcaatgctggacctgctataccaacgaagaagtgcaccggattctgcgcgaagggctgccggattctcccctgttcaacggacagattcaaagtatcggtccgcgctattgccccagcatcgaaaccaagattgtcaccttccccgacaaagagcagcaccaactgttcctcgaacccgaaggtgaaacaacacaggaattatacctgaacggattttcttcttctcttccgatggatattcagatcgccgcgctgaaaaaagtaccggcattcaaggatatcgtcatctatcgtcccggatatgcgattgagtacgattacttcgaccccacccaattaaaacattcgctggaatcgaagattatcaaaaacctgttctttgccgggcaagtgaacggaacaaccggttacgaagaagcgggaggacaaggactgatcgccggaatcaacgcacacatcaactgtcacggtggtgaagccttcacactggctcgcgacgaagcatatatcggtgtattgatagacgacctggtgaccaaaggagtagacgaaccataccgtatgttcacttcacgtgccgaataccgtattcttctccgcatggacgacgccgacatgagactgaccgaaagagcatatcacctcggactggcaagagaggatcgctaccaattaatgaagaccaagaaggaggcattagagcagatagtaaatttcgcaaagaactattcgatgaaaccggcattaattaatgatgccctcgaaaagttgggaacaactccccttcgtcaaggctgtaagctgatcgaaattctcaatcgtccgcaaatcacgattgagaatatcgcggaacatgtccccgccttccaaagagaattagaaaaagcaaccgctgcagactccgaccgtaaagaagagattctggaagcggcagaaatactgatcaagtatcaaggctatattgacagagagcgaatgatagcagaaaagctggcacgcctggaaagcatcaagatcaaaggcaaatttgattatgcttccatccagtcgctatctacggaagctcgtcagaagctagtgaagattgatccggaaacgattgctcaagcgagccggatcccgggagtatcaccaagcgacatcaacgtattgctggtactttccggccgataagcggcaacgtttcacgtgaaacaaatcatttaaagaaacgagataaaccaatgattatgagcaaagaaacgctaattaaaagcatccgggaaattcccgattttccgatccccggaatccttttctacgatgtcaccaccctgtttaaagacccttggtgcttgcaagaattatcgaacatcatgttcgaaatgtacaaggataaaggtatcaccaaagtagtaggtatagaatccagaggattcatcatggggcctatcctagctacccgactgaacgcaggttttattcctatccgcaagccgggcaaacttcccgcagaggtgatcgaagaaagctacgacaaagaatatggcacggacactgtgcagattcataaggacgcactcgatgaaaacgacgtagttttactacacgacgacctgctggcaacgggaggaactatgaaagcagcctgcgaactggtgaagaaactgaagcctaaaaaggtatatgtaaacttcattatcgaattgaaagacctgaatggcaaatccgtattcggagatgacgtagaagtagaatccgtattgactttataaacaaattgcttatatttgcagggcgtagagaatctacgcccttttttatttcccgctatttcatctataacgattatgaatacagaaccggaagccaaaacgaatgaatatctgagaggtattgtagccaacctgcccgaaaagccgggagtctatcagtatctgaacacagaagggactattatatacgttggaaaggctaaaaacctaaaaaaaagggtatattcttacttcagcaaagagcatgaacccggcaagacacgagtattggtcagcaagattgccgatatccgttacatcgttgttaacaccgaagaagatgcattattgctggaaaacaatctgatcaagaaatataagccccgctacaatgtattgctgaaggacgacaagacctacccttccatctgcgtgcagaatgaatactttccacgcattttcaggactcgaaagattatcaaaaacggttcttcttattatggtccctacagccaccttccttcgatgtatgcggtgctcgacctgatcaagcatctatacccgttgcgtacctgcaatctgaacctttctccggagaacatacgggcgggaaagttcaaggtttgtctggagtatcacatcaagaagtgcgccggaccatgcgttggactgcaatcgcacgaggattatctgaagaacatcgatgaaatcaaagagattttgaaaggaaatacgcaggatattagccgtatgctggtagaaaagatgcaggaactggccaatgaaatgaagtttgaagaggctcagaagattaaggagaagtatctgctgatagagaattaccggtctaaatcggaggtagtaagttctgtcctgcacaatatcgacgtcttttccatcgaagaagacgattcaaattcggctttcgtcaactatctgcacatcaccaatggcgccatcaatcaggcattcacctttgagtacaagaagaagctaaatgaatcgaaagaagagttactgacgctaggcattattgaaatgcgggagcgctacaagagccattcacgggagattattgttcctttcgaacttgatctggagttgaataatgtcgttttcaccgttcctcaaaggggagataagaaaaaactgctcgatctttctatcctaaatgtgaagcaatataaggccggccgattgaaacaagccgagaaactgaacccggagcagcgcagtatgcgtctgctgaaagaaatacaaaacgaactgcatttagacaagccacctttgcagattgaatgtttcgataactcgaatatacaaggatcggatgccgtagctgcctgcgtagtattcaaaaaggcgaaaccatcgaagaaagattaccgtaaatacaatattaagacggtcgtgggaccggatgattacgcttccatgaaagaggtggtcagacgacgttatcagcgcgccattgaagaaaattctccccttcccgacctgattattaccgatggtggtaaaggacaaatggaagtcgtcagagaagtaatcgaggatgaactgcatctgaatattccgattgccggtttggctaaggataataagcatcgcacgtcagagctacttttcgggtttcccgcacagacgattgggatcaaacaacaaagttctttattccgtctgctgacgcagattcaggatgaagtacaccgttttgcgattactttccaccgcgacaagcgcagcaagcgacaggtcgcatcggctctggatagcattaaagggattggagaaaagacaaaaacagccctattgaaggagtttaaaagcgtaaaacgaatcaaagaggcatcccttgaagaaatcgcaaaggtcataggagaagtgaaggctcagactgtaaaaaaagggttaagcaacgaataggctcacttctatgtggctatacgctaaattgttagtccatataaatcaagtatcagtatcatatggggcaagcgttagtttcctcggaggaaacgccagttccctttaaaaggaacggtcgtttccattaaaaggaacggccgttccctcgccgggaaacgacagtttccattaaaagaaatcataggaaactatataccattgatttctaaccatatagaatactaccggtaatgttatagagtttatgttcatgtctatacggttctaaggcaaactcaatcaagttatgaggcaaatacatctgtcgtcctaatagatatgcttctgcacaacagacagacacgcttccgaatgacagctacggttaatacttaatacctaatacttatctcctataatatttccttccaatccatcgttttttcttcttaatttcgtaaatttgcctttcgtaacattcaatagaatagagaaaatatcaatgagaatagttgtacaacgagtaagccacgcatcagtaaccatcgaaggacagtgcaagtcttccattggaaaagggatgctgatattagtcggcattgaagaatccgacggacaggaagatatagactggctctgcaaaaagatagtaaatctgcgtatttttgacgatgaaaacggagtaatgaacaagtccatcctggaagacggaggcgaaattctggttatcagtcagtttacattgcacgcttctaccaagaagggcaaccgtccgtcatacatcaaagccgccaagccggagatatctgtcccactctacgaacggttctgcaaagacctgagcagggcgctgggaaaagaaatcggcacaggaactttcggagcggacatgaaagttgaacttttaaatgacggtcctgttactatatgtatggacaccaaaaataaagagtaaaaccttgatgaaaaagccggtaaagctcttcgaagagtgataaacaggctctaaacatcaaactaatcatcataaaccaacagcaattatgaccctggaagaagcccaaaaagaagtagacaaatggataaagacatacggtgtccgctacttcagcgaattgacaaatatggccgtactgactgaagaagtcggagaattagcccgtgtcatggcccgcaaatacggcgaccagtctttcaaagaaggcgagaaagacaaccttgacgaagaaatagcagacatcttatgggtgctcctgtgtatcgccaaccagacaggcgtagacatcaccaaagccttcagggaaagcctggaaaagaaaacgaaacgagataataaaagacatatcaataacccaaaactgaacgatcatggaagagaatagctcacaatccaacaagtatgatgccgcattggcaaagtataacaccaatctgagcgatgcagacatacaggctcgggtggctgacctgattgaaaagaaagtgccggaaaacaatacggaagaagtcaagaaactcctgttcaactgcatcgacctgaccacgctgaacagcacggacagcgatgaaagcgtgatgcatttcaccgaaaaagtgaatgagttcgacaatgagttccccgatatgaagaacgtcgctgccatctgcgtataccccaatttcgcggatattgtaaagaatacactgcaagtagatgacatcaatatcgcttgtgtttcgggcggattcccttcttctcagactttcatcgaagtgaaagtagcggaaacggcactggctatcgctgacggtgcggacgaaatagatattgttatctctatcggtaaattcctgagcggtgactacgaaacaatgtgcgaagaaattcaggaattaaaagaagtctgcaaggaacgccacctcaaggtaatcctcgagacaggtgctttgaaaaccgcctccaacatcaagaaagcctctatcctatccatgtattcgggtgcagatttcatcaagacatcgaccggaaagcaacagcctgccgctaccccggaagccgcttatgtgatgtgcgaagctatcaaggagtactatcaaaaaacaaacaacaagatcggcttcaaaccggcaggaggcatcaacaccgtccatgatgcaatcatttattacactattgtgaaggaaatattaggcgaagaatggctgaacaaccgattgttccgtctgggtaccagtcgtttggccaatttgcttctctccgatatcaagggcgaagagatcaaattcttctaaggaattacattagcaatcaagtatgccgtaccgcgcttcaccttccgttcctatggaaggaagcgcggtattttttatataataaaaactaaagatacttatggacaaaaccattattttcattatctttgtcatagatgtagctatgctaacatagttaatcatctgtattagagaacgtttcttttattacctgattcctggaattcggcaaaattcaaagttatgagtggtaataagcaaacgggtctcacgcaccttcatgtatatacttttgttatatatcgaacggagcgtgagactgttgcttttatgtcatcataacggcttgccgaagccccaggaaaagacatatagcagcagttctcacgctttttttagttaaccataagcgaaaaagtataaaatgaagtcacacacaaagaacttacgttttaaccataaccccttaaatctgatactcggcaccagaaagaaacaaggtctgcgcatcggttatatggaggctgcactggatggcttctatcttaactgtatggaaaccggagtacacccggaaaaactaagtaaactattatcagataagttccattgcacagatgcaatttcttcctgccagctattcctattcctcatcaacgaaggcgacagagcctcctattctattatggtcccctatttactctctaccgaaaacctaaaccagtttgaaaacaccatccgcgaacgcttctacggagtagaccgattcattcaacagggcagaaatctatacaaattcaaagagtatatagaagaaagaggagagccgattgtatggattaatgacttagagagaggagtgatcggatgggatatggcacaagttgtcgggctggcccgggctgccaaagactgcggctacatcaccaaagaacaagcatgggaatacatcgaacaggcgagcacgttatgctccgaaatcctccgcacaccggaagaaatagacaaaagtttcctcatcggaggagcgatgaaatcgaataaaattgaagattgggaggaattaatcctgtgttactctctgctcaggaacagtggggagtagttatttctcacgagcgaccacgtaatccagataagtccgcagggcaaggcaaatatttgaatccggcaaggcagccagcaaatcaaaggccttctttttatattgttctattgtacgacaggcatattcaatacctccattatctttggtaaactcaatcagacgtacgatttcatcaggagttgccgtaccttccttcaccttgaacgctatctgttccgcccacgcatctttcgttgtattcaatgcatacagggcaggcagcgtcagcttaccttccagcatatcattaccagtcggtttgccgatcttcttgctatcaaagtaatcgaaaatatcatccttaatctgaaaacagataccaatatattcgcccaacagacgggcaaaagcgacttcctcctcacctacctgcactgacaaggcagccgcctcggcacaagcggcaaaaagagccgctgttttcttacgtattacgtcaaaataaacttcctccgaaaagctatgattacttacattcgaaagttgaagcaactctccttcagctagtttctgccccagcgaagataccagacggataatctcataattattagtctgctccgcgtgcacaaggcttgtagccagcagataatcacccgccagtacagataccttattattaaatacagcatttaccgaaagctgaccgcgacgctcggtactttcatcgactacatcgtcgtgcaccaaactggctgtatgaagcaattccaaagaaactgccgcatgaagggtggcaggagtcacagccccataaaggcgtgctaccaataagacaagaataggacgcatcatcttgccattcctcttgcgtatatgagttattacgctgtcgagcaatgcattcgaatcggaaagaggggtgtcaaaaagagctttaaaatcctccagttccgcttctatcggggttttgataagagagatactatccattcacaacactatttgagcacaaaagtaataataaaacgcttaatacggtatttttttgtacttttaccatgaaaaattaattaaatctatggagtcagacaataaattatttcttttagacgcttatgcactgatatatcgggcttattacgcctttatcaagaatcccagaatcaactccaaagggttcaatacttcagctatcctcggatttgtcaataccctcgaagaggtgctgaaaaaggagaatccgtcacatataggagtagccttcgacccctccggccctaccttccgccacgaagctttcgagcaatacaaagcccagcgtgaagaaactccggaagctatccgcctctccgtacctattataaaggatatcatccacgcctaccgcatcccgattctggaagtggcaggatacgaagccgacgacgtgatcggaactctcgccactgaagccggacgtcagggcatcaccacctatatgatgactcccgacaaagactacggccagctggtgacggacaacgtattcatgtatcgccccaaacatacgggaggttttgaagtgatgggcatcgaagaagtgaaagcgaagttcgatatccagtcgcccgcacaagtaatcgatatgctcggactgatgggcgatgcttccgacaatatccctggttgtcccggtgtcggtgaaaagactgcccagaaactaatcgccgaattcggaaatatcgaaaatctgctggaacataccgaccaactgaaaggagccttgaaaacgaaagtggaaaccaataaggaattgattactttctccaaattccttgccactatcaaaatcgatgttcctatccaactcgaaatggacaagctcgtccgcgaacaggcagacgaagattcactccgacaaatttttgaagaactggaattccggacactgatcgaccgggtactgaaaaaagaaaattctgccggcggagtaacaatggcaaccggaagcaaaacggcaacggccaaaagtgctccctctcctcttccactttttcccgaagaaggaggagccatacaaggcgatttatttgcgaattttacgggcaatgacgcaggcgaagccaaaaaatcgaatctagagacattagaaacgcttaattgcgactaccaactcattgatacagagaagaaaagaactgaaatcattcaaaagttacttacatcgaaaattctctcgttagacacggagactacaggaacggaaccaatggacgccgaactagtcggaatgagtttctctatcaccgaaaatcaggctttttatgtgccggtccccgacaatcgtgaggaagcattaaaaatcgtcaacgagttccgtccggtcttcgaaaatgagaactcattgaaagtcggacaaaatatcaagtacgacatgatcgttcttgaaaattacggagtgcaagtgaaaggtgcgctctttgatacgatgatcgcccattacgttcttcaaccggaacttcgtcatggaatggactatctggcagaaatctatcttcactatcagaccatccacatcgacgaactgataggtccgaaaaggaagaaccagaaaaacatgcgcgatctcgacccgaaggatatctaccgctatgcctgcgaagatgcagacgtaacactgaagctcaaaaacgtcctggagaaagaactgaaagagaacgatgccgaacgtttgttttatgatatcgaaatgccgcttgtacccgtattggtcaatatagaacggaatggggtattgctggatacggaagcgctcaaacaatcgtctgttcatttcaccgctcagatgcaacgcatcgagcaggaaatttatgaactggcaggcgaaaccttcaatatcgcttcgcccaaacaagtaggcgaggtactgtttgacaaactaagaatcatcgaaaaagcgaagaagaccaaaaccggtcagtacgtcacttcggaagaagtgctcgaaagccttcggcataaacatcccgtagtagaaaagattctggaacaccgcggactgaagaaactgctgggaacttatatcgatgcacttccccaactgatcaacccgcgcacgggacgggtacacacgtctttcaaccagaccgtcacctctaccggacgcctcagctccagtaacccgaatctgcagaatattcctatccgcgacgagaacggtaaggaaatccgcaaggcatttatccctgacgaaggctgcctgttcttctctgccgactattcgcagatagaacttcgtatcatggcacatctcagcgaagacaagaatatgatcgacgccttcctcagcaatcatgatatccacgcagctacagctgccaaaatatataagatcgacctgaaagacgtagactccgatatgcgacgcaaagcgaaaaccgccaacttcggtatcatctacggcatctccgtatttggccttgcagagcgaatgaacgtagaccgaaaggaagccaaagaactgatcgacggctatttcgaaacttatccaagcgtgaaagcctatatggagaagagtatccagatagctcaggagaaagggtatgtagaaacgattttccaccggaaacgcttcttgccggacattaactcacgaaacgccgttgtacgcggctatgccgagcgaaacgccatcaacgcaccgattcagggaagcgccgcagatatcataaaggtagcaatggcacgcatttatcagcgattccagacagaaggcatacaagctaaaatgatattgcaagtacacgatgaattgaacttcagcgtgcccgtcaacgaaaaagaacgtgtagaagagatcgttattgaggaaatggaacacgcttaccgtatgcacgttcccttgaaagcagattgcggctggggcaagaactggctcgaagcacactaaaacaaggtttatcctgccataacaaaacaggataaatcagctaaataatggagaggatgagttataacattatttaacccactatccagaaagctaggaaaaagatcacttccccaacgaagtgtttcattctatatccggcaggttgactgccggatatttttttgtcaccaatcttggcaaaaagcaaggtatcaccttagccatcatctgacattttgatattattttagctttatatttgtataaataccgaataaatatataactttgcagcgtaatacaagagtattactagacaaatgaaagaataatactaaaatcaaatagccatgaaaacaaaagtatctttaaaaatgtttgttctatccgtagttcttctcatgacctcttttgttgcttctgcacgcagttatgatggtcagttggtttataatccagtagaagaaaatggagtaatggtaggtcagaccgtttacaaaatgaacggaagtacacttgccaactatatgaagtataactacaagtacgatgacaacaagcgcatgattgaaagcgagaccctgaaatggaacagtaccaaagaggaatgggaaaaagatctccgcatcaattatacatacgaaggaaaaactgtaacaaccaattactataaatggaacaataagaaacgcgcttacgtgttagttccagaaatgacagtgaccatggacaatactaatttgtaacagcatttttttaacaacatactctctcattctaatattctaacaaatagaaaacgccgttcctgatgaagaaacggcgttttcgcatctatcttaagaagtaattgtcacaacacaaaaaaccggtcctgcaaccctttcagaaaacttcgggaaatcaccaaatcactcttatcatgaaaaggcggatagagctgacaacacttcccatcaatcatcgccagataattaacattaacaatagccgactgactgatctgaataaaagcttgtgaataaccaatgatatcttcggcttttgtatttcgcttcagattcaatcgggtctgattgaacaggactacctgccactgccgcttgtctttcagatattcgaaatagccgatttcttccagtcgcaaaagcttgaatcccgtcaccgtgctgatcataaacattccctgttgcggcatcaaagcactgacagaagaagaaaaagaggaagaaggagttgccggtattgaagctacagctttccggtagcgctctataacaactttcagatcttccgtctcaaaaggtttcagtaagaaatcgaaggcggactcacgcagggcctgaagcaaatatttatcatacgaagtataaaagacaactttcatatcccacagcacctcatcgcgcatctcactcaacaagttaagccccagcacatccggaagttccacatccagaaacaacagatccggacggagttccattatcatctttttgccttttgcgccattgtttgcagttccttttatttctaattcctgataagcgcccagctccctgcgcaaagcatcgattgccgtacgctcatcatctacaataacgactttatatttatcttctgcattcatcataaatcataagaaaaatgaaacggtataaacaccgacacttgcgtaccggtctgcccatcgtttcggttatctatattgaaacgtatcttctcatttttattctttgtattgagtagctgtatcgtttgatagagcactttcagccccgttcccgttcctctggtcgaagaagccacttgcggaagatacccccgcccattatcacaaatcacgatacggactccttttccttcacgggaaatacggatagtcaattccttctcatcatcttttccggccagcccatgcttaatcgcattctctaccggaatctgtacaatcatagaaggaatcattatactttttgcatccaacccctcctccactacgaccgaaactgtgaagtcttcgccgacacgtccactttccaggcggatatatgactgtacaaaatccagctcgtcctgcaaagaaacacttagtttttctgtcagttcaagactccgacggagatatttgaccagttccatcagattattcttcacctcttccgatccattgaactgattaatttcacgccccagcacattgaaagtgaaatggggagaaatccggccccgcaaattctccatacggacgcgatttatctgttggaagaaacgttcacgaagaaactcccgctttttccgcatataccagatgatcaccaccgttccggctgccagcaacaggcagacaagcacccagatatacatgctcagtttcaatacacgcacttcacccgcttgtcgttgaatctgcatttccttgcgcaatacgatcgtgtcctgacggtaacgcatatccagttcggctacacgggtacgaatccgttcgctacggatggagtcattcagttgataatcacgtttcagatactcatatgcattacggtagtcacctgccttttcataataatgttgcagatactggttgcgtatagtaagcatattggcatccacgtgtccggtagaagcagtccgtgctatcatttccctggcacgagcgatatttccttttttcagagaaagctcaatcatcagggtttcaatgtagtgcatggcggagttgttctttatctccgaaaagtaacggtaaccttcattcagattgttttcggcagaatccagccggttcgtcagcagataaagatcgcccagattaactttcgaaagattgctttcgaataccatttgcgggtaatccgctatcagctccgctgcttgccgcatatagaccagggcttcctgataatctttcttataatagtaatgatttccccgattattaagatacacccacttttcgctgactgtcatttcatcaaaaaactgtcctgccagttcgtaataatgattggacaaatcaaaatcacgcaagtccatgtaagtctgtcccagtccgcaatagaccggaaatttggaatgttccgacagatgcagggagtcgcagataaacaatgctctccggtaataggaagcggtatgtgccagttcgccacgatgcagatgggcatccgccagattcatacagatatccgaaagaagatgcgccttatctcctttcagacggtaagcataggatttctcataataggcaaccgccgaatcgggctgattgagttgcatccagacatttccctcaatgttatacacatccgaaagcacatcattccatcgcgggcatgcagctgcacgcttatcatactcttttacagggcggttataatagaggatagagtcgaaatcggacgagatgaagaaagtctttccatacaatcccatcaagcggtaataactcatcgagtcctgtgcctgacgcattgcgttacgcaataaagaacgtgaataaggtaagttggaaaacaaagaatcctgtgcacggacttctaaagaatcaataagtgactgttcacacaaagcgtgactgcggtgcctatccacgcaactgcagttccacaatatcaacaaccctatcaacccaaatagcttcatagtagatttcgctttattcatccccttgtccgtgttgaattttgaatgccacaaaaatacattaattatattgaatctcaacgaaatttattatttttttaatacctttgtccccatataaacatgagtaactgacctaatgagtccattgaactttacccacattctgacacaggcagtcgatgagctatcggaaagcgaatcttacaaagggctgtttcatcaacataaagatggcgaaccattgccctctgctaaagttttgtatgaaattatcgagctttcacgtgccattctcttccccggatactacggaaattccaccatcaacagccggacaatcaattatcacatcggtgtaaatatcgaaaagttatttgacttgctcacagagcaaatcctggccggactatgtttcagtacggcagaaggagactgcaacgtctgctcggagtcgagaagagaagaagccgcccgactggctgcgaactttatcagcaaactacccgccatgagaagaatactggctacggacgtagaagccgcctacaacggtgaccccgccgccaaaagctacggtgaagtaattttctgctatcccgccattaaggcaatcagcaattatcgtattgcgcacgaactgctggaactgggtgttcccctgattcctcgcatgatcacggaaatggctcatagcgagacgggtatcgatatccatccgggggcgaaaataggcagtcacttcaccatagaccacggaacgggtgtcgtaatcggtgctacaagcatcatcgggaacaatgtcaaattatatcagggtgtcaccctgggagcaaaaagcttcccgctggatgccgacggaaaaccgatcaagggtatcccccgccacccgatactggaagacaatgtcatagtctactccaacgctaccatccttggaagaatcactatcggaagcaacgcaaccgtaggaggaaatatctgggtaacggaaaacattcccgccggagcaaagattgtacagacaaaagcaaagaaataaaatcaataaactatatatgagcgaacaattcgagatgatagccaagaccttccaaggactggaagagatacttgctgaagaacttacaacactgggagccaacgatatccagataggacgtcgcatggtttcatttacaggagacaaacgtatgatgtacaaggcaaatttctgcctccgtactgctatccgcattctaaaaccgatcaagaattttacggcaaaggatgctgatgaagtttacaaccagatacaggccattccatgggaagagtatcttgatgtgaacaagacgtttgcgatagatgcggttgtattcagcgaagaattccgccattcaaagttcgtctcgtataaggtaaaggatgccatcgtggactatttccgtgaaaagacaggcaaacgcccgtcggtacgcatcaataacccggatgtactgctcaatatccatattgcacataccacttgtacgttgtctctggattcttccggagagtcacttcatcgtcgcggataccgccaggaacaggtagaagctccgttgaacgaagttctggctgccggtatggttctaatgacaggatggcgcggtgaatgtgacctgattgacccgatgtgcggttcgggcacaattcctatagaagctgcactgatcgcaagaaacatcgctccgggagtattccgcaaaggattcgcattcgagaaatgggtggatttcgattcggagatgttcgatgagatttacaatgatgatagtcaggagcgcgaattcacccataagatttacggatatgacaacagtccgaaagcgaatgaaatagcgacgcataatataaaagcggcgggtgtatccaaagatgtgacgctgaaactgcaaccgttccagcaattcgaacagccgcaggagaagtccatcatcgtgatgaatcctccttatggcgagcgtatctccaccaatgacctgctcggactgtaccagatgattggcgagcgtctgaagcacgcatttgtaggaaacgaggcttgggtactctcttatagagaagaatgcttcgatcagatcgggctgaaaccaagcaagaaagtgccgttgttcaatggtgcactggaatgcgagttccgcaaatacgagattttcgacgggaaatataaggaattcaagagtcaggagggagaaggagaagagaagaaagagactgaaggaaactatgatacttccagacccagagaaagaaaggaattcaaaccgcgcggggaaggagaattcaaaccgcgtcgcgaaggggaattcaagccacgcagagaaggagagtacaagccacgtcgggaaggggagttcaaacctcgtaaagaaggagacttcaagccgagacgagaagaaggaagctttacccgggatgacagggacagaaagcctagaggcgagttccgtggggaaagagattcgagagctccgagagaattcagaggaaaccgtgagcccaggataccgaagaaggaagaagagtaatttcatagatagttaatggcatcccactaaaaaaaatgccattaacttattgatagacaatataaggtcacattttgcgatcttatcatctgatgagtaagaaagcgaattgaatatctcgaaaaagacgtatcatccgacagagaaagacaactctcctgaacagggtaaaatagaaggatttaaaaccaataaagataaataaaagcaatgagtaaaattggaaaaagagccattctgatattgctggcgctaccaatcggattcaatgttatggcacaggaaatcaaaaagctgacactggaagacttgattccgggcggcgagacctaccgttatgcagaaaacctgtacggcctgcaatggtggggagacgtgtgtatcaaaccgagtaccgacaccatctacactgttcaacccagaacagggaaagagacagtgctgactaccctcggacaaatcaacaaagtactggtagacaataaagcagggaagctgccgaccccgtactcaatccgctacccatgggcggacaaaccgcaaatgttactgaaagtatccggtaagtacatcgtatacgatttcgagaacaaccggattgtcagcacgctgaagctgaaagataaagcagccaacgaagattattgtgttgccaacggaaacgtagcctacacagtcaacaacaacctgtatgtgaacgaacaggcaatcaccgacgaacccgaaggcattgtctgcgggcagtctgtccaccgcaatgagttcggcatcaataaaggtaccttctggagcccgaaaggcaacctgctcgctttctaccgcatggacgaaagcatggtgacgcaatacccgcttgtagacatcaccgcacgtgtaggagaagtgaataacatccgctacccgatggcaggaatgaccagccatcaagtaaaagtaggcgtctacaacccttccaccggcaagaccatctatctgaatgcaggtgatccgaccgaccgttacttcaccaatatcagctggtcaccggacgaaaagagcatctaccttatcgaactgaaccgcgaccagaaccatgccgtactttgccaatatgacgcaacgacaggcaagttactgggcaaactgctggaagaaacgcaccccaagtatgtagagcctcagcaccccatcgtattcttaccgtgggacagcaataaattcatctaccagagccagcgcgacggatataaccatctatatttatgcgacctcacctccagcctcaaaggcgaatggaaaagcgatgccgcaggcggcaagcacatcgaatacgtcccgacgaagcaactgaccgagggcaaatggctggtaggcgacattctgggcttcaacgccaagaggaaagaagtcatcttccaaggagtgaatggcacaggctccaacaactttgcagtaaatgtcaacacaggaaagcgcagcctcccgttcagcttccgttctatcacagaaggagaacataacggaatgctcagcgcatcgggaagctacctcatcgaccgttattcgactcccacccttccgcgccgtattgacatcgtggataccaaaagcctgaaaacagtcaacctgctgacagccaaagacccatacgaaggctacgagatgccgaccatcgaaaccggtactatcaaagccgacgatggaacgaccgacctatactaccgcctcaccaaacccgcagatttcgacccgaacaaaaaatatccggtcatcgtctacgtatacggcggcccgcacgcacaactcgtcaccggcggctggctgaacggctcccgcggatgggatatctatatggctaacaaaggctatatcatgttcaccctcgacaaccgcggcagtgccaaccgtggactggaattcgaaaacgccaccttccgccgcctcggcatcgaagaaggcaaagaccaggtgaaaggcattgaatttctgaaatccctcccctacatagacggaaaccgcatcggtgtacacggatggagcttcggaggacacatgaccactgcccttctgctccgctaccccgaaatattcaaggtaggcgtagccggcggacctgtcatcgactggggatattacgaagtgatgtacggcgaacgttatatggacaccccggaaagcaatccggaaggctacaaagaatgtaatctgaagaaccttgccggacaactgaaaggtcatctgctcattatccatgacgatcacgatgacacttgcgtaccgcagcacacgctgtcgttcatgaaagcctgtgtagatgcccgcacctatcccgacctgtttatctatccgtgccacaagcacaacgtatcaggccgcgaccgtgtacatctgcacgagaaaatcacccgatactttgagcagaacctatagcaacctataattgacagctcacagcatcacaccgaaaaactcataactgaaaactcataacttaatactcattatgaagatattattactaggctcgggcggccgcgaacatgcactggcatggaaaattgcccaaagtccgaaagttgaaaagctgtacatcgctccgggaaacgccggaacaaacgccgtaggcgagaatgtcaacatcaaagctaccgactttgaagcgatcagcgctttcgctctgaaagaaaacatcggaatggtggtagtaggtcccgaagacccgttggtagaaggcatctacgattacttccagaatcgtcccgaactgaaacatatcgccgttatcggtccgtccgccaacggagcacagctggagggcagcaaggagtttgccaaaggcttcatgatgcgtcatcaaatcccgacagcccggtataaaagtatcacagccgaaaacctcgaagaaggtctggctttcctcgaaacgctggaagccccatacgtgctgaaagctgacgggctctgtgccggaaaaggcgttctgatcctccccacactggacgaggcaaagaaagaactcaaggaaatgcttgccggtatgttcggctccgcatcggcaacagtcgttattgaagagttcctgagcggtatcgaatgttccgtattcgtgcttaccgacggcgaacactacaaagtcctccccgtagcgaaagactacaagcgtatcggtgaaggcgacaaaggactcaatacaggcggtatgggcagcgtgactccggttccgtttgccgacgaagaattcatggaaaaagtacgtacccgcatcatcgaacctaccatcaacggactgaaagaagaaaacatcgtctacaaaggcttcatcttcctcggactgatccgggtaaaaggcgaaccgatggtgattgaatataacgtccgcatgggcgacccggagacggaaagcgtgatgctccgcatccagagcgacctcgtggaattgctggaaggtacagccgcaggcaacctccacgaaaagacactgatcatggacccgcgctcggcaggttgtgtgatccttgtgagcggcggttatcccgaagcatacgaaaaaggcttccctatcagcggcctggaacaggctgccgctaccgaaagcatcattttccatgccggaacagccatgaaggacggacaaatcgtaacgaacggaggacgtgtgatcgctgtctgctcttatggcgcaacgaaggaagaagcgctggcacagagctataaagtggcagatatgatcgacttcgacaagaagtatttccgtcgcgatatcggattcgacttataatgaaaagcaagagactacaaggtctggtcacagcagggcggtggacactccctgctgcgattttcatctgcaccctttgttgggtgctgacctctgccctattgcccgaactcaccatgacagcgggcgaagaaggcggttccgtgctttggcagtctgcccgcacgttgctgctccccgcatgggcggagcatcttgtcagtttcttgatttacgcggctatcggctatttcctgatcgagctgaacaaccggttcagtatcatccgtatgcgggcttccgtgcagacagctatctattttctgctggtcaccgtctgtccggagatgcacctgttatatgccggaaacgttgccgccataacctttttattctccatctatttcctgttcaagagttaccagcaggcacaggcgtcaggatatctgttctactcgttcctgtttatcggtgcagggagcattctctttccccagctcaccttcttctcggtgctctgggtgtttgaggcgcaccgctttcagtcacttacgttccgtagtttctgtggcgcgctggtaggatggacaatgccctactggatgctgttcggacacgctttcttctacgatcagatagagctgttctatcatcctttcaaagaactggctacttttggagatatattcaacctacagatactccagccgtgggagctggcgactctcggctatctgtttgtattgttcatcgtcagcgccgcccattgcgtcgttgccggattcgaagataagatacgtacgcgcgcctatttacagtttctcatagacgtgacactctttctcttcgtactgattgtgctacagccgtcacaatgcagcaatctcttgccgttgctcatgataagcaacagcatactgatcggccacctttttgtgctgaccaacaataaaacatcgaatatattcttcattgttgctacggtctgcctcatccttttatttggttttaacgtatggacgcttttatagactcaacgatacaactcctcatcgaatggggacttccgggattgtttatctcggccttactcgcagggagtattgtaccattcagttccgaactggtgttggtagcactggtaaaactcggactgccacccactgcctgtatactggctgccaccctcggcaatacggcaggcggaatgacctgctactatatggggcgcctgggcaaaataagctggattgagaaatacttcaaagtaaagaaggagaaagtagacaagatggtaagattcctgcaaggaaaaggagcattgatggcattcttcgctttcctaccggccatcggagaggtgatctccatcgcactgggatttatgcgaagtaatatatggcttaccaccgcctccatgtttgtcggcaaactgatacgttacattctgcttctgtacgtactggaaagcgcatggaacgtcgttgcgggatgaaataataggtaataagtaacaggtaacaggtaataagttttttgagatgaaaagagtgattgaaaagactgatgacgggagcgccaccctatttgttccggaattgaatgaacattatcattcgaccaaaggagcacgtacggagtcccagcatattttcatcaacatgggactgaaagcctccgctgccccctctccgcatattctggaaatcggtttcggaacggggctgaatgcttggcttacacttgaagaagcagaaagaagcggacgtaacgtacattatacaggacttgaactctacccgttggaatggcagatggtggagcaactgggatatatagaacaaccagcagccaccgacctgttcagagcgattcatacatcaccgtgggaagaagaaatatcctttacccccaacttcactctttgcaaagtacaagccgacgtcaataaatgggttaatgaacgagtagaaaatggacaacagacaataaaccgcaccattacacagcgtagccattctccattatcattcgacgttatctatttcgacgccttcgctccggaaaagcagccggaaatgtggtcgcaggaactatttaaccgtttatatgttttattaaatgaaggaggcatcctcaccacttattgtgccaaaggagtcatccgacgtatgctgcaggccgcaggctttatcgtagagcgccttcccggtcctccgggaggaaagcgggaaatactacgtgcccgaaaactggaacagaatcaacccccgatattaatacaatagtcatgaaacaacaactaaaagatttgaaaacactccttcttctcggctcctgcctcctgttggcagcctgcacgggtcgcacgtccaaagcaagcggcagcgaagaagcgaaaccggtcattaccgtcactatcgaaccgcagcgctacttcacggaagcgattgccggtgataaattcacggtagtcagcatggtcccgaaaggttccagtccggagacatacgaccctattcctcagcaacttgtctctctgggagacagcaaagcctatctccgcatcggctacatcggctttgagcagacctggatggaccgactgatgaataacacccctcatatccaagtattcgacacctcgaaaggtatagacctgattctgaacaacggtgagcacaaccacgcagcaggacatcatgaccacgacgggcacaaccacgccgtagaaccgcatatctggaactctaccaccaacgccctcatccttgccggaaacaccttcaaggcactttgtatgctcgacaagcccaacgaagcatattatctggcacgttacgactccctctgccaacgtatccagcacaccgacagccttatccgccggcaactttccgctccggaatcggccaaagcctttatgatttaccatccggctctctcttactttgcccgtgactacggcctgcatcagatttcaatcgaagaagggggcaaggaaccttcgcccgcccatctgaaagaactgatagacctgtgcaaatcggagaaagtaaacgtcatcttcgtccaaccggagttcgacaagcgcaatgcggaaaccatcgcacagcaaaccggcacaaaggtagtccccatcaacccgttaagctacgactgggaaacggaaatgctgaacgtagccaaagctctcacccctatggaccccgaataacaacgggcctccatagcgttaatgaccgaatgatacataaacgaagtaattctccaaatatgaaaccgattatcgaaataaagaaccttgctgccggatacgacggccgtaccgtactccacgacgtcaacctgaacgtttacgaacgggactttctgggcatcatcggtccgaacggaggcggtaagacaacactcatcaagtgcatcctcggtctgctgaaaccgacagccggagaaatcaacttccatgctcctacagaagcatcctcccactctcaactttccacttccaattcttcactttccctcggctatctgccgcagtatagcaccatcgaccggaaattcccgatttcggtagaggaagtgatactttccggactaagtatccagaaatccctcacctcccgcttcactcccgagcaaagagaaaaaggcaagcatatcatcgcccgtatgggactcgaaggactcgaacaccgttccatcgggcagcttagcggcggacaactgcaacgcgcactgctgggacgtgccatcatctccgacccttcggtactgattcttgacgaacccagcacgtatatcgacaaacgttttgaagcccgactctacgaactgctggcggagattaacaaagaatgcgccatcatccttgtcagtcacgacattggcactgtactgcaacaagtgaaatccatcgcctgcgtcaacgagacactggattaccaccctgacacgggcgtttccacagaatggctggaaagaaatttcaactgccctatcgaactgctgggacacggcacgttgccacaccgcgttctcggtgaacatcatcatcatcactaaacattcatttgccggtgctacatcaaagaacggctgcaccgcatatcagtcatttacaacggtcacatcaagcagcaacaactgacttctcaactgttaatgattgagatgtcagatgttaatagttgacatctcaggtattaacagttgagaagtcagctattaatgtctgacaacgcaagtattattgaccaataaatgattcaatgcttaatataaaagatacaaaattagtatctttatacctactgttgtttatactgtttagtgattcccccgtttcactaaaagggcataagataaagtaaatcacctttctgttacttaatatttcttactttctgcctcattatccttacaaatcactatctttgcgcccacgtaatctgttttttaacgaaaaatctagatagtgctaatgaaacagtacagaactataaacaacctcgtgggttggattacattcatcattgcggcaacggtctactgcctgacaatagaaccgaccgcaagtttttgggactgtcccgagtttataactaccggttataaactggaagtaggacacccgcccggcgcacctttcttcatgctggtagcgaacctgttctctcaattcgcctccgatgtaaccaccgtagcgaagatggtaaactacatgagcgcactgatgagcggtgcctgtatcctgttccttttctggagcatcacccatctggtacgcaaactggtaatcaccgacgagaacaacatcacgaaaggacaacttatcactgtcatgggtagcggactggtcggcgcactggtctacaccttcagcgacaccttctggttctctgccgtagaaggcgaagtatatgctttctcctccctctttacagccgttgtattctggctgattctgaaatgggaagatgtggccaaccagcctcacagcgaccgctggctaatcctgatcgcttatctgaccggactgagtatcggtgttcacttgctgaacctcctctgtctgccggcaatcgtattggtgtactactacaagaaaactccgaacgccactgccaaaggctcattgctcgccctgctcggatcgggcgtactcgtagcagccgtgctttatggcatcgtgcccggtatcgttaaagtcggtggctggttcgaactgctgtttgtcaacggactcggcatgtcgttcaactccggcgtcgttgtctatatcattctgctcgccgccgcccttatctggggtgtgtacgaaagctacaccgaaaagagcagactccgcatggccatctcattcattctgaccatcgccctgctgggtattccattctacggacacggcgtaagcagcatccttatcggtgtcgtagtgatcgcaattcttggcatctaccttgctccgcaagtacaggaaaagatcaaagagaaatggcgcatctccgcccgtaccatgaatacggcattgctgtgcaccatgatgatcgtaatcggttattcctcttatgcactgatcgtgatccgttctaccgccaacacaccgatggaccagaactctccggaagatatcttcacgctgggcgaatacctcggccgtgaacaatacggaacccgtcctctcttctacggtcctgctttctcctcgaaagtggcactcgacgtgaaagacggatactgcgtcccccgccagtcacagacgggaagcaaatacgtccgcaaagaaaaaacctcaccggacgaaaaagactcatacatcgaactgccgggacgtatcgaatacgaatacgcgcaaaatatgcttttcccccgtatgtacagctccgcgcactcctcactctacaagcagtgggtagacatcaaggggcatgacgtcccatacgaccaatgcggcgaaatggtgatggtcaacgtaccgaaccaatgggaaaacatcaagttcttcttctcctaccagctcaacttcatgtactggcgctactttatgtggaactttgccggacggcagaacgacattcagagcagcggagaaatagaacacggtaactggatcaccggaatcccgtttatcgacaatctgctggtgggcaaccaggaattgcttccgcaggacctcaaaaacaacaaaggacacaacgtattctactgcctgccactgctgctcggcctgatcggactcttctggcaagcataccacagccagcggggtatccagcaattttgggtagtgttcttcctgttctttatgacaggtatcgccatcgtactctacctcaaccagacacctgcgcagccgcgtgaacgtgactatgcgtatgccggttcgttctatgcctttgccatctgggtgggtatgggagtcgcaggtatcatccgtatgttacgcgattactgcaagatgaaagaagttccggctgccgctctcgcatcagtactctgtctacttgtccccatccaaatggccggacagacatgggacgaccacgaccgtagcggacgctttgttgcccgtgacttcggtcagaactatctgatgaccttgcaggaagaaggaaatccgatcatcttcaccaatggtgataacgatactttcccgttgtggtacaatcaggagacagaaggtttccgtaccgatgcacgtacctgtaacctcagctacctgcaaaccgactggtacatcgaccagatgaaacgtcccgcctacgactctccgtcactcccgatcacttgggatcgtgtggaatacgtcgaaggccagaacgaatacatccccatccgtccggaagtaaagaagaatatcgaccagatgtatgcacaagcagacagcgcgctcgaaaacggaaatccggaagcgatgaacgaactgaaagaacagttcggagaaaacccgtatgaactgaagaatatcctcaaatactgggttcgttcggataaggaagggctgcgcgtcatccctaccgacagcatcgtaatgaagatcgacaaggaagctgtccgccgttccggcatgaagataccggaagcgctgggcgactccatccccgaatacatgaccatcttgctgagagacgccaacggcaacccgaaacgcgccctctacaagagcgaactgatgatgctcgaaatgcttgccaacgccaactgggaacgtcccatctacatggctatcaccgtaggcagtgaaaaccacctcggcatggacaaccacttcacgcaggaaggtctggcataccgcttcactccgttcgatacagacaagctgaacagcaagatcgacagcgaaaagatgtacgacaacctgatgaacaagttcaagttcggcggcatcgagaaaccgggcatctacatcgacgaaaacgtaatgcgtatgtgctacacacaccggcgcatcttcacacagctcgtaggacagctcatcaaggaaggcaaaaaagacaaggcactcgccgcactcgactacgccgagaagatgatcccgtcatacaacgtaccgtatgactgggcaaacggcggcttccaaatggcggaagcctactaccagctgggacaaaacgaaaaagcgaacaagatcatcgacgaacttgccaacaagtctctcgaatacatgatctggtacctcagcctgactgattaccaactttccatcgccagcgaaaacttcatgtacaacgcaggactgcttgacgcagaagtacgcctgatggagaaatacaaatcagaagaattggctaaacattactcggaacaactcgaccagctatacaatgagtatgttgcgagaatgaaagggaaataaaaactaagtaataagtattaagtaataagtaataagctgcgccataagccgcacggttattacttattacttattacctgttacttattaataaagactcttatgtttatagaacaaccaccttggttcttccgagcgctgtatccacaagccatcttccggatggacccaaacgaacgggcagtctacctgacttttgacgacggccctatcccggaagttaccccttgggtactggagctactgaagaaacacgatattaaagctaccttcttcatggtaggcgacaatatccgcaaacacccggacgaataccggatggtggtagaacacggacaccgcatcggcaaccatactttcaaccacatccgcggctttgaatattccaatccggattatctggccaacaccagacgggtagacgaaattatccactcggacttgttccgcccgccacatgggcacatgggattccggcaatattacacccttcgccaccattaccgtatcatcatgtgggatctcgtaacccgcgattacagtaagcgaatgcgcccggaacaggtactgaacaacgtaaaacgctacgtacgcaacggttccatcatcaccttccacgactctctgaaatcgtggaacaacgggaatctgcaatatgctctcccccgtgccatcgagtttctgaaagcggaaggctatgtgttcaaggtattctagctgccggcaaagaaacattttacctgccgacagcaagttttctaattaccgataaggttttcatccatatccattatgaaaaagctcctctcctcagaccgaatcaaagccgaagcactacgcctcggcttttccgcctgcggactggcgcctgccgaagctgtagatgaaactgtggctaccgccttccgtcaatggctggcggacggttgccaggcagagatggcgtatatgcagaattatgaggataaacggctcgatccacgcttgttggtggaaggggcacgtacggttatcagcgtggccctaaactattatccggcgaaaaaacttcccgaaggtgagtatcagattgcatggtatgcctacgggaaagattatcacgatgtgatgaaggggaaattgaaggaactttttgagtttatagagaaagaagtttcattctccaaagaaacagacagtactatcgcctcgacaaacaatatcagcacatatactgaaaactacgcctcagccccccaagtcccagtatcccaaacctccgcttctccacttcaaggccgcatattctgtgataccgctcccatactcgaacgttattgggcatggcgtaccggcttgggatggataggaaagaatacacaactcatcattcctcacgccggctcctgcttcttcttaggggaaattattcttgatagggaagctgacaattatgactctccacaacgaaatcaatgcggctcgtgtacacgttgcctggatacctgcccgacaaaagcgctggatgctcctttcaggctcaattccgagagatgtctttcttatcttaccattgagtatcgtggggaactttcgctcaatacaggaaaaaaaatgggtaataaaatatatggctgtgacgaatgtctgaaagcttgcccttggaatcgctttgccactccttgccggacagccgaatttcaaccgtctccttctttgctaagtatgaagaaggatgattggcattcgctgagtgaagagcaatataaaaccattttcaaaggtagcgcagtgaaaagggctaagtatagtggattgatgcgtaatataaagattattaaataaatatttaaatattaagagctactaccttacgataatagctcttaggatcaattaatgcaagttcttctcataacaaacagttaaaccactatataaaaatagtatttcatgcaaaatattattcagcatattgcatcaaaatagcaggaaaatcaatagaaagtcctgcataatttgcagtagacggaactcttcccttaaataatcccattgacatatatgcatctgtaatataagctaacgcaacctgcccatcattcattaatacaggagaaagaataatttttccctgtaaatacaaaccatcatcagttttagttattattgagccgtacatcactcctccttgcccatcagacaaagcataattttgctgctgtggagtggttatagctaaagctccatcttgataggtgaccgctaaaacaatcgttgctcccaacagccttgtcattggtagctggaatatatagccattaccacccggatttttaacaatttgagtattttcctctaatgaaagaacttgattaataccaaatgctgtagcaacgactttcacaacacctgtccattgtcccaataagtcatcaatatcgtactgcaataaagcatattcaatttcacgaatgccagtagtcacttttacaatggccgaacgaattttaccagtgagattctcttttgcaataaacttaaatccatcactcgtcatttcataggataaccattgagaagcatctgctggaatagatacctgaataggcaaattactcgacatttcaacagggacctcctctgcagcatctgtcaatgtgaaataggtagcatctctattatatttccaaatagctccttcctgcagtatggttgcttgctgcgtactcacaccatcagttaaaacgatttgtgcgctacgccccggataacctgtattagcatctacagaaatggaaactttatgatctgcaacttcgattacctgacaccaatcggcattcaccgtagccgtgacagttccagttgctgcaaattcgacagttccagtgccaccactagctttcatatccaaatctgattttataattgtcaattttacagtggcagcatcgtcatctgaagaacatcctgcaacaaaaaataagcagaatattattaagtataaattcagtatatttttcataatctagttttttatttattcctcaactttcataaagaccatctctccatacatacgtgccaccccttgaacatatgaactttgactataatcaggtgccgaatagcggtcgaaggccatataatcagcttttgcaccacctactgcttcgaataccccatcatcctcaaatgtaaatccaaacggagactgttgtacatttgccacaaaaccaaacatcagacctgcctgataactaatatatgtaggataaaatcccatggcataacaatatgtagtacatcccaaataatatcctgatatataacctaccttttgagtcttaaaggacataattccttcacctctatcataatcgagcactatatcaccaattagtcccctgagaatataactcttattttctacatcctccataatagatattggtaattcttcgtctgtcaaattattatctttatacatcttgcaggtaagagtataattacctagataatcattatatttaatatatccctccggataaattcctttcattttaacgttagttgccccctcgtcagtacaagtaaaaagctcggaggaagggtcccacacaaaattttgcacagttactcctgccagtgaaactggttcccggaaacgaaagccatcggttgtaaaaaggaaaggagattgctcttgtacaatgttaccaccatcattataggctataacaaaagtataattacttcgctgcgtcataccaactaaatttccatcaaccaacaactgatattgtataaagaaagcattctcttctacatcattcacagagtttatatatgcctcccagttcaaatcatccggaagcgcatacattactatcgtatttccatactttttgccctgcattacaattttctcggctgaagcttcctttataataaactcgtaatctccttgcaggttggcattggggttggaaccgccgccttgtggcttggcatatgcatgaataaaagcattataagtgtcgaatgttagcattgtagcttcctccgatacaaccttataaagagatgaaagagtctcatcgccttcgtatccttgagatgccattgtaactcgctgaccatcaaacttgcacagaagagttatgcctcccaaagcatagtcctgacctatgtaatattccattctccaaccattagatgccgattctaatagctcactatattgcttcacttcctctgttgcacggttcgctgaagaatcatcaaaataatcctcttcctggaaaagacaggattgcaaaccaaagcatacaagagccatcaacaaataaatcattatattctttttcataatcttcctgttttattcaatagtacttaaatccagctctggaatttcttgctgacgccttaacacaatctcacgcaaatcatctaaattaataccccaagtttcaagcatataattgtatacaatagtaaacttctgattaataatagccgctccggcagttccggcaaccttcagcatattatcccagtaagcctgatcgtgagtaacatacatggcgatattctctacaaaatcttctcttgcctcactcatcgcatatgccgtcacaaatccttccggccatgcttccgcatcctctcgcaaatatgaatttccattttcagcaacatagaaataccagtcggaaccaacatattttccttcggtaatgcgatcaaacgatgggtcataattacgcttctgatgcaggatatgtgcaaattcatggtgcatcgtcttaaagtaatactcattcaaaacttcgatatcgacattctcaaagtccagactgttcacttcgtacaatgttatcttctttcctccctcggcagtacccaacaccttcgtaccactgctatcataagccggagaacctatcaagtgaaaagtttttggcacataagaccgaagaaaagccggtccggcaagttcagtatatgcttccatccatacatgcttgataatcttggccaaagcaaccgatttatcgtaatccgccggtaccagattatatttgtgatcactttcaatatcttgcatacgatacttgaaatcaacgttatacggatatgtataattagcaagcaaccattcatcaaaaccattatgttccattggctctgttgaaaaaatactatgcttggtgtcaatatcatcgccattattacaggctccccaaagaatgggcaaaacagccgttagtatataaatataatatttcttcatattatttcctccttttaattttcagtacgtggattgggttgcattcctgccagaactacactcttaggaatttgcatagcacgtcttgcgtcatttaccggcatttcatctgttacgactatattgttattagcaatagaacggcgatagataacaattccataacgtttaatatccggccagcgcagaccttcgtgcaaagtagcaatacgtctcatatgcagaatgcagtgaataaagttctcctgtatacctgattcaatagtaaaatcaggctgaagctttttcttgggagtcggattttgtgtcggattgtaataatccatcttatcataatactcatttatcatccccggagttaaagtttgcttattagaagtatatgctttctcccatgtagtaagatctgcagcagccattggatagttctttttcagcgtataagcctcagccctgcaaagcaaagtctcgtctgtagagaaaatcacaggcatataatacaggtagtcaccagcataataaccgccctttctcaacatactgcattcatagcccgatgttgtaaaaggctgcatatacatgcggtcagggataccccataatccggaagaacgtgatgtttcgtaagaagcaattaacttattatgtagataacgttttcctgtcatgtaattactcagaataataccccagttagatacggtactacctatcaacaagttagccttacttgtagaagcaatatatgcgtcgggctgtacattatcattagcagagagttttcccaacgcttcccaatcccgtaattcggcagcaggatcacttcccaacacacgatctgcatattttatcacctcatcacaattagaaaagtcaggcttcatataataaagatagaaacgtgcagcaaaagcatatgcagctttccttgtgaaatgatatttcggcacagaataactatcatcggaaataagagccataccatctaataagtccttctcaatcttctcataagtctcctgcaaagtaccccgcccgtattgtggttgcacagttgtttcaactttagtcatataaggaatacctaattcctgtgatgcatgagtattataagcattacaaaaaatatttgctaatacaaaatgattgtacgcccgacaaacaagagcctctcctcgctgcggcatcaacgattccggatttccccgtttctcaatctcttccaaagccatgttagcagaagcaatagctatataatgggtttcccaaagatttgtaggcgtatcctgatattcttcctgggtatctttccagttatagcattcttcctcagataacttataataagaatatctggcactgttatcgtcggtattatcactataaagttcaaacagttcattcgcagatccttccggataagcagaaacaagcattttagctattttttgctcagaattcagctccgtccggttatctggtaattcgtcaagaaaatcattacaagagctaccgacaatagcaagcgttgcgatgaacaatggaatatataattgatttcgtctcatctttaatcttttttttattattaaaatcattctcttacaatcctaaacgcagagttaatgtaaactgacgtggcaccggtgaagctacaccaccagtattaaagaattcaggatcttgaccattcaatttcttatctgcataaataaggaataaattagttgcctgtaacttcaaagaaagattggaaatcttcgcagcagaaatccagctcttaggaaactcataagaaagtgagatttctttcatacggataaaatcaccttttgcaattcgctctgtagaataattgtaagcattgtaagctttatacaatgttcggtttgcttcatattgcggattactcaagattgcaggaatattagtctttgcctcatccccagaaagtgtccaacgattcttgaattcacgaggcatagcactcaaatcggaatatttataattaaaatatggattcaaacgaacaacattaccaaatgaataagtcatgaatacattgagtttaaaccctttatatgcaaaaacgttaccgaaactaccagttattgtaggatctgtcggaccttcatatttcaaataatctaacttctcacgttcctggaaattaatatcagtcgatgttatatttccattgatatcgaacataggaatacctttttcatccaaacctgcaaaaggaatggagaaaagcccgcgcacaggatatccttcacgtgcaaatccatttcccgaaacaagttccatcatacgagtacgtcctcgcaaatcagtaacttcattcttagcatgagaaaaaataaaatcagaattccatgagaagtcttttgttttaatattgctggttgaaagggtaaattcaataccatgtgacttcattgtagctacattggcatatttataaatagtacctcccactccttgtgttggaatcaacccaatcaggtcatagttattgcgcgtgtaccagtcagctgaaagattaatgcgattattaataaaacctacatccactcctatattcaattcatgcttcttttcatacgttaattcactattttccaaatccactatatgaagacccgtttcttgaatatcagtgaaaggacgataaggtgaataactcttaataatagcttgtgaatttgttacatcagccggaccacgatcagctgtcaatgagtaagatgccttaaatgtcaaatttgaaagcgttggttgaagtgattggaagaatttctcttcatgaacattccacgctgcagaaagattccacgttggcagccaacgagcagaacggctacgtcccattctattagttccttcatagcggaaagtaccattcaacgtataacgcccgtcatacgaataagtagcatttgcaaatgtagctacactacgatatctagtatgccccatagaataatacttttctccagtctcaatacctttcttaaagtactgataaacatatgatggaatctcacccatagaatattgcataccccatccttggaatgaagagttagagcgttgaagatcatttacttccattcctgcaaaaagattagttatatgcttttctgcaaatagatgattccaggatacagtaccacggaaatccagtcccaacatcttacgatcttgacgctgataaatacctccttcaggaagaatcgaaataggtaatgcatatgggttatctggattcttatacaaccagtcgttttcatcacgaatagtagcatcgtccaaccccgtacgataagcaattgcttgattagaatcatccattatattatgttcttgtgatgatgattgataacgcacagcacccagcgcactgacttccagaccctgcaacaccttccatttcaactccccctggaactttacatcaacaacattcaactcaataaaattattgtccaattcacggagaatattaaatggagcataattagccacataatctgtattaggatctaatgtacgtgaagtattcagtgcgtatgaataggggttgatatcaaaatcacgtgtaacctgacctgccgcaacgtccaatgatgagttcatggtacctggtgcattctgtttacggtaagaagcacttgatatcaagtttatgcttaggttctttaagatattataagtcgtattcaaattggctgtataacgtttcacttcactctgcttataccatcccggatcaagcatggcactcaatgacgcataaaaagatgatttatcagaacctgaagtaatacttacagagtgattctgtgaaatattatttgagaataatacatcaaaccagtcggtattacgcatttcggcttcggtcaaataagcattacgtgcttctaaagtattcatcagcccaaattgaccattcgtttcattaaactggtcgatcagtttatacatacgtccgtacacacctgaattctttgcacgaaataaatcagcactattcaaccaacctttttgctccaattctttatatattcccatttgctcctgagaattcataatattgaactctttgtatgagggcaccatacgcgtagtaaactcacccgtataattaattttgctgactccggctttacctttctttgtagtaacaacgattacacctgccattgcacgtgcaccatagattgaggttgctgaaccgtctttcaaaatctgaaagctctcaatatcatcggaatttaaaccagcaatagccgaactaatcagagtttcagcatcacctgaagataaatcatcaggtcccacatcaatagcatcttccataataactccatccaccacccataatggtttggagctaccataaatggaagtagcaccacgtacacgaattttaggagcagtaccaaacgtaccggatacgttctggactgacacacccgcagcacggccttcaagtccacggctaatatcagggagaccatccaattttacattatcagctgttaattgttgagttgcaccagtaaaaaggcgtttgtccattttttgcatgccggttaccactacttcctccagaacttctgcatctggtttcatcagaattcttatcgttcctgcttttatggggacctcctgagttttcaatccgatatagctaatcttcaaagttctagcagaacttattttattttctcttttttacgtaacacataattgtatcatattctcctataacctattttcatactaattatttatatctaatataatttttatattattcaaggcttagttaaagataaaaagggagtgtttagatgacataatgattatttaaacaaggctaaatttgcatatactgacagaaatatgacattatgatagtttgatgatatgtatttgttttcataactatcataatgtatttgcaatagttttcaaatttattttgaataattgttttgtatttataaatatgtgcttatatttgcaaaatagcactaagcgaaaataagcgacttactaattcttataataataaagagtgtttatgaaaagaaaattaatgctgttattggcctgcttgctggcaagcataggtctagtgattgcccaaacacctaaaaaggtgacaggtgtcgtcatttctgaagaagatgatcagcctgttgtgggagcatccgtattagtgaaaggtacaacgatgggaacagtcaccgatatcgatggtaagtttaccataaacgatgtaccaagttctgctagaactttgaaaattagctacattggaatgaaaactcaggagattcctatcaaaacaggaacaataagaattctgatgaaaccagatgcagaagttctggaggaagtagtggtaaccggtatgcaaaaaatggacaagcgccttttcacgggagctgcaacaaaacttgatgcagaaggcgtaaaacttaatggtatggcagatatcagccgtggtcttgaaggccgtgctgcgggtgtgtcagtccagaatgtatccggtacatttggtacagctcccaaaatccgcgttcgcggtgctacctccatttatggtagttccaaaccattatgggtagtggatggagttattatggaagacgctgtagaagtcagcgctgatcaactatcttcaggcgatgctgaaactctgattagttcggctattgccggtctgaacgcagatgatattgaaagctttcagattttgaaagacggctcagcaacctcaatctatggcgcacgtgcaatggcaggtgtaatcgttgttactacaaagaaaggtaaagctggagtcagtagaataagctataccggtgaatttactacccgtttagtaccaagctacaatgactttaacatcatgaactcgcaagatcagatgggagtatacaaagaaatgcaacagaaaggctggttaaatttcgctgaaacctcccgtactgcagaaagtggtgtatacggaaagatgtatcagttaattaacacatacgatcctactaccggacaatatgcgttattaaatactgacgaagctaaaaatgcctatctacgtgaagctgaaatgagaaataccgattggtttgacacacttttctctcccagtctaagtcagaatcattctgtaagtcttagctctggtacagaaaagtcatcgttctatgcttctttaagtgctatgcacgatccgggatggtacaagcaaagtggagttgatcgctatacagccaacttaaatatgaatcataatatcttaaagaacctaagcataaacttgatatcaagtgcttcttatcgtaagcaaaaagcaccgggaactttaggacaagacattgacctagtaaacggtcaggtaaaacgtgaatttgacatcaacccctattcatatgcattgaatacttcacgtacattagacccaaacacttattacaccagcaactatgctgatttcaacattctgaacgaattggacaacaattacatggaactgaacattgcagatttaaagttccaaggcgagttgaaatggaaaccaattaccggattagagctaagcgctttgggagccgtgaagtatcaatcaacttcacaggagcacaacattaaagaccagtcaaaccaggcatcggcttatcgtgcaggtctagatgacaagacaattatggaccgcaatccatttctttataagaacccagataatccatatgcactaccgatctctatcttaccggaaggtggtatttatcaacgtagagactataagatgctaggttatgacttccgagctacagctagttggaaccacgtatttaatgatatacatatcactaacttctttgcaggaacagaaatcaactctacagaccgatcaaagaattactatcaagggtggggtatgcaatactcaatgggcgaaataccctactatgtatatgaattcttcaaaaaaggtatcgaagacggcaataattactactcattgagtcagacccgtagccgtagtgccgccttcttcgccaatgctacctactcttataaaggtcgttatactgtgaatggaacagcccgctacgaaggtactaaccgtatgggtaagagccgctcggcacgttggttacctacatggaacgtatcaggagcatggaatgcccacgaagaaaaattcttcagcaatttaacttctgttctttcacactttacactgaaagcatcttattcgttaacagccgaccgcggtccggcagacgtaacaaactcacaggctattataaccagctatagtccttatcgaccatttacttctatccaggagtccggattgtatattaaggaactagaaaatagcgaattaacttatgaaaagaagcacgagttgaatattggtgccgacatgggcttcttgaataaccgcattaatttagctgtagactggtacaaacgtaacaactacgacttgattggtatcgttaatacacaaggcgcaggtggacagatcctgaagtatgcaaatatcgcttcaatgaaatcacatggtattgaattcactttatcaactaagaatattaaaacaaaagatttcaactggaacaccgactttatattctctaatgcaaaaaatgaagtcactgatttgaaacaaaatgcgaatgtgatggagcttatttccggtaatggattcgctaaacaaggctatccggttcgtgggctattctctatcccatttgtaggtctcgacaaagatggtattccagtcattataaatgaaaagggcgaagcgactagtaccgatataaatttccaggaacgccaaaatactggtttcctgaagtatgaaggtccgactgatcctaccattacaggtagtttgggtaatatgttctcatacaaaggtttccgtttgaatttatttatcacttattcatttggaaatgttatccgtttaaatcccgtattcaaagcatattattcggatctaacggcaatgactcgtgaatttaaaaatcgatggacactccccggagacgaagcaaagactaatgttcctgctattttgagcaaacgtatgtacgacagcaatgaagacttgaagtatgcctacaatgcttacaattattcaacagaacgcattgcaaagggggattttatccgtctgaaagaaatctcactggcttatgacttccccaaagcatggatcaacccattgaagttaacagacctctcgctgaaagtccaagccaccaaccttttcttaatctatgcggatgataagctaaatggtcaggacccggaattctttaatgcaggtggtgttgcctcaccggttccccgccaatttactattactttaagactggggttataatttaaaataagaacgaatatgaagaaatacataataatggccagtgtggccgcgctcgcaatagggctctcatcgtgttctaatttcttagatgagcttcccgacaatcgtaccgagctgaatgaaaacaatgttggcaaaatattactttccgcctatcctactacagcaatctgtgagatgggggaaatgtcatcagacaatactgatgcttatccgaatcgcttttcttctttcaaccgtttgcaagaagatctctataagtgggcagactctgcagaacaagatcaggactctccccatgcactttgggaatcttgctatatggcaatctctgcctgcaacgaggttttgaaagtgattgaagacgcaggaaatccagcttctcttagcgctgaaaagggagaagccctagtatgtcgcgcctatgctcattttttacttgccaatatattttgtaacgcttatagcagccaagcaagttcagacttgggtatcccctacatgaaaacgatagagacaaccgtaagccctgattatcaacgtggaactctagaggaggtataccaaaatattgagaaagatctattggaaggtctagatctggttactgatatttatgcagtccccaaatatcactttacaaagaaagcagctcaagcttttgctgcacgcttttacttgtactatgtaaaatcggataaatccaattacactaaggtgatcgattacgcaacaaaagtattaggaagcaatccagccacctctgtacgcgactggaaatctttgggtgcactagacataaatggcagtgttcagccaaatgcttatgtagatgcaacgaatggcgctaacttattattggtcagtgcaggttcttattggggatatgttcatgcaccttatggactaggcgaaagatacgcccatggaccgaaagtaggcaatgagacatgcaattccgtcggtccttggggaagtgactattatatgggtgtttggagtaactcaagtgcactgccgaccaaaatcgttgttatgaaaataactcaatataaagaagtggttgacgcagtagccggaacaatcaacggacacatgatcaatgcagcatttactacagatgaaacattactctgtcgtgcagaagcttatgcgatgaaagaaatgtatccacaggcaattgctgatttaaatatatggcgagaagcatacacacgttctactaccccgcttaccacagaatctataaacgatttctacggaagcatggaatattacactcctactgaatctacagttaagaaaaaattgaaccccgactttactataacaaatgaaacacaggaaaatgtaatccactgcatacttcatgcacgacgtttaacaactttacatgaagggttacgctggcaggatattaaacgctacggtattactatctatcgtcgtttaatgaatgataatggtactattaccgtcacagataagctggaacccaatgatcctcgtcgagcaatacagataccgagcgatgttatttcagccggattaaaaccaaaccctagaactaaataaaaatcgataagttatgaaaaaatatataatatatacattgatcgttactatagccgtttttttaggctcatgtaataaagatgatattgataccaaacgcagtatatttgatcctactgaagtttatgagcccaacgagtttgacaaatggctacttgacaactatgtttacacttataatatccaggtgaaatatcgtctggatgacaatgaaacggatgtagaatatcatctggttccagccaagtatgacaacgcaattacattggctaagattgtaaaatttgtatggatggaagcttatgacgaaatatggggaattgacatgacccgtacgtatgtccctaaactactccaattcattggaaatgttgcttataccgagtcaggtatgatcctcggacaagccgaaggaggaatgaaagtaaccctgtttcgtgtaaatgaaatagataaaaacaatctcagtgtagctcaattaaatgagtactatttcaagacaatgcatcatgaatttacacatattcttaatcagaaaaaagcctatgatacatcatacgatcgtatatcggaatccgactacgtaggttcaagctggtatagggtatctgagtcggttgctctgcaaaaaggatttatctctccttatgcaatggaccgtgctacggaagattttgcggagatggttgctatttatgtcaccaatgacgctagtacttgggaagatatgctagcaagtgccggcacaacaggaagaccgatcatagaaaagaaatttgagattgtatttgattacatgctcaattcctggggacttgatttagacaaattgcgcgaaattgttttgcgccggcaaagtgaaattaccgaattagatttaagtacgctttaataattgtaggatatgagaaagattaaaatatatggcttactgacttgcgtttgcctgatgatgcaatcgtgtctgtttaatgaagatgatatctttgatgaatcttctgcacaacgggctatagcctccgtcaacgaatgtcaggagattttaaagggcgcagccaatgggtggttactcgagtattatacaggagaagacggagaatatggtggcttcaatgttttggcacgatttgatggcaataatgtaattatggctgcagatttcgctacagataattacgaaattggagaagaatctacttccttgtataaagttgaatcataccagggaacagaattaagttttgattcatacaatgaattaattcacgaattctgtgaaccgagtggttataattcaccaggatatgccggagattatgagttcgtcttcagaagcgtttcaaaagaaaagatcgtactgactgggaaaaaacatggagtaacgttgatcatgacacctctgcctgctgaaacaaattggcaagagaaactgaccaatattgccaatgtcgtttcacaggcttcatatgtaacctataagttaattgtgaatggtcaggaaataactaaaatgggacaggaagagcatgccttctcagttaccaaagtagacgaaaccggtgaaacaaccgtaagtctatatccgttcatatatacagaggaaggcattaaaatgtatgaaccattagtagttaatggagtagaaataaacaacttcaaatgggataatgaaaaccttacatatatttgtacagatacaggtgtagatgcaaaaatagaattctattgtccggaaggatatctcaactatttaggcaactatatactacaattagcaaatgggcaacgtatacaacttgagctcaaacaaaaaatgataggaaaatcatttgcaatgaattttgctttgagtggtactcctattgaatttgtctataactataatatgacaacagactgtattgatgtaccttctcagacagttggcgtatatcaaggttacaacgtattattatatccaggaattcccggaggcaatttctatgcagatgactcagctgtattccaaggacgtattgcaaatacagatccgcttacaattaagttcacttatgtaaacaatcctatttgcacccttatgttgctggtatatcaaaaaacagacggttggtatggattctctacaatgttccaagatgtaacattgataaaagttgattaattaacaaatagcatattatgaagaaaataacaagcatatttgcattattattatgcgtattcgtcttctcatgtagtaacgacgacgataaagaaacatcttctttgcagattgttagctcaaatgtcacatttgaatctgctggaggaaccggtacaataaaagttaacgcaataagtgaaattactgctacctccaataaagattggtgtaccgtaagcgtgaatggagatattataaatgtttctgtcattgaaaataatgatatgtccggacgtacggcagctgtaaccataacagatggtgaagcatccactttggttcctgtttcacagggtggctgtgttattctgtataataaatcagaattggggcatgcttttacttatgcaggtggttctgctacagtatctttctcaaccacagcatcttattcaatagaagtacccgccgaagcccaaagttggttatcatacacacttgacgaagaaaacagaactataacatttaatgttgctgcgagtgctgataaaaccccacgaggagcggcagttaaagttaccgcaggtaaaaaaacgatttactatcatcttggagagtatgaattgaaagacatcgcaggcaaatggagagtatcctttgttgatggagatgatagtactctagctggagaaatagaagtagttcaggatgaagaggaacctaccatcttctacttgtcaggtatttccaatttctttgacctaccgttaatctataatggagaggccttactcacaatgggaggtcttaatttaggaacatatgctgggagatataacatctatacagtaacattgtctgaaggtggatatgtcagttgggatatgtcaacacaatatgttgcttatccgtcatccatcaatggcaaatttgcattggtatttggtgataatggttcctgggatggagacgtagtcaatggcattgcctactgggcattctccggtgctgcgggaacaggaagtgcaggatggttggagaaattcaacgctcttacactaagcaaataagacggcaagcgtgcttagctaagtctgtctctctaacatgtataagatttagctttacattaattattcatataaagggtgttcaacattggacaccctttacattatccttttccatataaaaagcaatacaaaagatgatgttattattaaattaattcgtatctttcggacacacaaaaaagttaaaccaacaatcacacatatgaaaatgattcttttccgactaatatgtttaaagacatgcctactattaatccctgtactttacgcacaaaacaactatcgtccgggatttatcatcactgttcagaaagacacaatatatggagaaatcgactaccgtacagataagatgaatgctaaacgctgcgtctttcaatcacaaggtaatgataccgaaccagtaacctatcatcctttcgaaatcttgggataccgttttacagacgacggtaaatactatgtctccaagaacatagaattgaaatacggtgtctctacccccgtctttctcgaatatttgctacaaggaatgaaaagcttgtactactatgagacagaagataacataccaatctattttgttgaagataataatacccttgtaaaaatagatgcgcccaaactgtccaagcaggctaccaatatacagtttaaaggccagactgaccgatatattccccttcttcattacgcattcaaagactgcccaagcctggctccccaaatagaccgggctcgtttcagccgaaaggagatgataaaaatcacaaaagaatatcattatgcaatgtgtaccagtaatgaagattgcattgaatttgaagcaaaagaagataaacgttcaatacagttagatataactccttatgtaggagttattcaatataatgtaccatcgggtagtccgatcgggctctatagctcacccgaactatcttacctggcaggagtcactttagctatcagcaatagacggtggatgagttcgctcagtggttgttttgatgtgtctttttcccgcataacatcctctgcaagatcattgaataatgaaaattcatccactatatttaaacatagcggaacaatgttttcgggtaagttaggaatacgctatacctatccgaaaggaatggcgcgaccatttgttgagcttggagcagacttcagtggaatgatcaatgccaagataaagataaatgataagagcgagagatggctggatggtgtctaccctggctattacgccaatgcgggagtaaacttcaaactttcgcggaaaaacaaacaaatgatatgcatacgcgctcaattcaaaggcttaagagacatgatggaaaaatcagccctcgttaatggatggtcaggagtgataggatatacattttaagtactgcattattcgtttatatagtactcacactaggaaatctcttataaaaccgtttttcttgttatacccatattctacccgacaataaaactccccttatttcagcctttcgaatgaaataaggagagccttatataactgggttatcagctattaatacttgacttctcaggtattaataactgacgcgacaagtattaatacctgagaagtcagatattaagacctgtcgtgacatattagaacgtttgtaccagagtttattaactaccgtcttagtaagtcactgtcaacggtgtacgcaccttctgcgcatactcagccatatacgcattccacgcatcaaccgtcttgatagcagccttatcccaggcagagccccagtaataagtatattccgagcccggttcatactcgctgattgccagtacatgaccgtcagctccaccgcgcagttccttcttctccttttccgggaaaagaaccgtctttgcttcttttaccaatgaaggaaatgcagcgccgataaatatcttaccgttacccccgcttctgtcggttgtagggtctacataggtgatatagccgtttgcagcgtctgctgtaaccacaccgtccggttcacgaagaacgattccggtagtcacaggcatcgcttctttcaggttagtatacgaaacaacggttttattcaggtaagaaccagcatccaatgtgatgacacgcgtttccaccacgttagaatcgccacgaacagtcaacggattaaattccagcttcactgtgaaacgcagcgggccattatcaaggatttcctgtgtccgatagcaataaggatagataatcgtatcacccgccatcagagcggctgtaccgcagcccagcgtaggacctacggcataacaatccattccgtagccgtggtcaatgtgataagagatggcattttgcagttcggcagccgctttagggtctgtctttttcagttcggcaattctggcacgcttttccttatccagttcttcagcgtaaagactttcaagaatcggttccgtagtgttatacttcgtaaagaggtcgtagccgaaaccacgttcaccacgcttctgcaaggcagggccataggcacggtatccgcccaggtcattctcccatgccacgtcgtccagacgttcgggataatagcggccgcaggcaattacattatacgggtcgggagtaccggattggatagtataagtggctgtgccatttgctttcaccgtagccgggaaaaccactttctcgtcatacgtcacttgataaggtacttgctggccatcttcaccaagcactacgatctgagccgtatcagccagctgcagcttggctgtaacgtcactcatcggaacttcaaccatttcacctgtgcgctccaacgccagaggattggtcactgtaaccgtcattgactgcttgctgtcagcacaagaggcaaaacccatcagggcaatagcagccaaaataaatatcttcttcatattatacacaacaaataaggggatagaatcaggtaaaaaaacgaaaggggataaatgtaaaccgtaaactattcaacagaaaaacgataaggtgacaggcggtaaagaatctccttaccaccctatcaccttataataatctcttgttatcgttatttcggctgttttccgatataagccaggataccaccgtctacgtaaagaacatgaccgtttacagcgttagaagcctcagaagccaggaatacggcaggacctgtcagttcttccggatccaaccaacggccggcaggagtcttggcgcagatgaatgaatcgaacgggtgacggcttccgtctgcttgtttctcacgaagaggagcagtttgcggagtagcgatataacccgggccgatgccgttacactgaatgttgtattcaccatattcagagcagatattgcgggtcagcatcttcagaccacctttggcagcagcgtaagccgatacagtttcacgacccagctcagacatcatagagcagatgttgatgattttaccggcacgcttcttcatcatggcaggcaacacagccttagaaacgatgaacggagcgttcaagtcgatatcaatcacacgacggaagtcagcagcttccatttcgtgcataggaacacggcggataataccggcgttattaacaaggatatcaatcgtacctacttctttctcgatagtagcaaccattgcctgaacagccggttcgtctgttacgtcgcatacataaccgtgagctttaattcccttttcagcataggcagccatgcctttgtctaccaactcctggttgatgtcgttaaaacatacagtagcgccttgttctgcgtaagcagaagcaattgcaaaaccgataccgtaagaagcacctgtaacgagagctactttacctttcaaagaaaaattcaaatactgattcataattttttgttattaaatgatgaaaactattgtagttgtttattttaaatctgtaattaatgagaagtcctgatcgccataatcgaggttttcaccgcccataccccagataaaggtatagttgtgggtagccgcagccgagtggatcgaccattcgggagacagaacagcctgatcgcccttcatccatacgtgacgagtttcgtccacctcacccataaagtggcagatagcgtgctcttcggggatttcgaagtagaagtaagcttccatacgacggctgtgcacgtgggcaggcatcgtgttccatacgcttcccggagcaagttccgtcatacccatctgcagctgacaggtaggcaatacctgattgaccagcatcttattgatgttacggtggttggaaccttccaacgagcccatttcagccactacggcatccgctttcgtcactttacggtcgggatagttgcggtgtgcggtcagtgagttgaaatagaatttggcaggattggaagcgtccttgctttcgaacgtcaccacacggtcgcccgaaccaaggtagagggcttctttatagtcaagttcgaaaaccgcatctccggccttcactacgcccggtccgcctacattgtaaatacccatttcacgacgggtcaggaagaacggagccttcagcgggtcgatcgcttcgagtgtcagcacctctcctaccggaagcgcgccgcctacaaccatacggtcgtacatggagtacaccatattcacttcgttgggaacaaatattttttcgattaagaaatcgcgacggattcttgcagtatcataactttttgcatcctcgggatgcgcagcatagcgaatttcatagttcgttttcataccttatttatttatagttattgaataagctctctttctcaaatgcacatcgtttacgtacacgatgcaaaaatagtaaaagaaaacgggttaaccttgcaattttgttccaattatccaccaaaaatgtccagaattgatgcaatgtacatctttttaacgaactataatacgttttgaaggagtttgacgactattttcaatgatacaaaacgatataaaaaaaggaagctccaataatcaatgattatcagagcttccttttggttgtcctaccaagattcgaacttagacaaacagaaccaaaaactgttgtgctaccattacaccataggacaaacatatgcgctttctgttaaaaagcggtgcaaagatagaggtttgcaagcaaacctccaaatatttcgattacttttttactttgccaccttgcaaatcgctgaattttacttcgcgatcagcagaaaatagttctttttaccacgctgaacaagcagatatttcccgtcaagcagatcggcagtcgtaataacctggtcaaaagcttccagtttttctttattcaatgatacgccaccgccttgaaccaacttacgcatttcgcctttcgaagcaaatacagccgcattatcgacaaacagatcaacagccttcactccttccgccaaggcgtcacgagagatttcaaactggggtacgccttcgaatacagccagcaacgtatcttcgtccaacttgcgcaacgactcggaagtagcgttaccgaacaggatattagacgcatctaccgctgcattgtaatcttcttcggagtgaaccatgatagtcacttccttggccagacgtttctgcaaagcacgcaagtgcggagcctgctggtgctcggccactaatgcttcgatttcttccttctcgatcgaagtgaaaatcttgatatagcgttctgcatcagagtcgcttacgttcagccagaactggtagaacttatagggagaagtataacgagggtccaaccagatatttccagattcagttttaccaaacttaccaccgtcagcttttgtgatcagcgggcaagtcagcgcgaacacctctcccccattggtacggcggatcagttctgctccggtagtgatatttccccactggtcggaaccgcccatctgaagtttacatcctttagtttcatacagatgaaggaaatcgtagccttgaagcagctgataagtaaattcggtgaatgacagtccgtcacgtgcttctccgttgaggcgacgctttacagaatcctttgccatcatatagtttacagtgatatgcttacctacttcgcgaacaaagtcaaggaaagaaaactctttcatccagtcataattgttcactaattcagcacggttaggcacatccgactcgaagtcgaggaacttggcaagctgttttttgatacacgcctgattgtgacgcaatgtttcctcgttcagcaggttacgttctgccgattttccggaagggtctccaatcatacctgtagcgccaccgatgagtgccagcggcttatggccgcagcgttgtaaatgacgaaggatcatcactccacaaaggtgaccaatgtgtagcgaatcggcagtcgggtcgatacccaaataggcagtcacctgctctttgtttaacaactcttccgttcccggcatgatgtcctgcagcatgccacgccatctcaattcttctacaaaattcatcgtattactctttttattaggtttttattgtctttcaattccatgtgcgacaaaagtacgactctttctcggaagatacaactcttaacgcctaaaaaagactttttgaatattttcccgaatcgcctgccgcagctcttccgcatccgtgcttcgtgctttcgccacctgcttcagcacttcttcaatgtcgaccggactgtcatccgtctccagaaacaggcgaccgacaggcactcccttcaccgtttcctccgaataatgcgcaccgaaagaaagataaatgccgttctttatcaattgccctgcttgctgcggtttcccgcgaaagccgtgccaaatccagggctgagccggattcagtttcttcctcaccgccagcaactcatccatcgccttcacacaatgaataatcagcggcaaccgatacttctccgacaattctacctgcttctcaaacatccttacctgaagctccatcggagcagctgtcagtttatcgagccccgcctctcctaccgccacaaactgctctttcacaagcaactgctgcagaagttcaaattgctcttccgcattgcgttccgtcagtttccagggatgaatgccggccgaatagaaatatccctctttacctgccgtcctgacacccaaagccgacaggcacagcgaatcatccaccggtaatggaaaattaataatcgccctgccgtgggaaacatcctccgacttgtgagtatgaatatccagaatatgactcgcgttattctccatatctctcgttctttagggtaaatcgtttctaaggcacaggatcataaccggaaccaccccacggatgacatctgaggatgcgccggacagccagatagagtcctttgacgggaccgtgtttcttgattgcttcgaccgcataggccgaacaggtgggcgtaaaccgacaagacggaggggtaaggggcgaaatacacacccggtaaaaatagataggaatcagcagtaagaatgaaaataccttcctcacaagacttttcagggccatccagcagacggacacccggtgagcacggggcttcataaagataacttttcagaaatgcgcgaaagcgctgtcttcattttctcttccagttcggcagtggctacaagttcgtccgacagatagataaaagcaattgccagacgctgccctttgttttgcaaaccgtccagcagtggctgtttgttcttccggtagacttcgcgtatctgccgcttcacccgattgcgctttacagcacgtttgaaacgccgcttcgatacgctgataagtatcgttgccggcacttcaccttgttctacgggcatatatacaacgcgtatcggaaagatggaaaacgacttggaatggccgccttcgaacatctttccgatcaatattttactattcagcctttcggctttacgcaaagtatatacgctcacgctgtttatttattgttttccttgatgaacatatcaagcgcagccgtcattgacggagcctgcacagtcggtgcttcaaggtccaaacggagtccggcgtcgcgtacagcctgcgcggtagtcgacccgaaggtaccgattctgatctctttctggtcaaagtccgggaagttcttcttcaaagaagtcactccggcagggctgaagaacacgagcatgtcataatcaaattcctcatccgatgtaaagtcattgctcacagtgcgatacattacagcttctgtatgctgtatgttattcttgtcgagcaggtttttcacatcatcattgtgcacgtccgacatagggacgagatatttctccgttttatgctttacgatagatggcaccaaatcttcaatctttccggtagcaccgaagaagattttacgtttgcgatattgcacatacttctgaatgtacaatgcaaccgcttctgtgacacagaaatacttcattgtttccggaatagtcacacgcagctccgtacacagattaaagaagtgatcgattgcgtggcgtgaagtgaatataacggcagtgtgatcaagaattgaaaccttctgttgccggaattctttcgccgaaagactctcgacctttataaacggccggaaatctatttttacgccatatttctctgctatgtcgtaatagggagatttctctgacgcaggcttaggctgcgaaactagtacttttttaattttcaacgtcctaaatttttattagcaatacattgtttacctggatcattccctgatagagtagcagacagggtatgatttcaagagcgcaaaagtacaaaattaataggaaagccgcacttaattgatgaaaaaaaagctttacccacttataaaacatcaatattttagtaaaaattagaataattagtccgattatcactaaattggtcagattcagatcgaaataaacaaggaatagaacaaaaggaaaaagggcgaatccgacgtaatatatgagcgtagaataagattccagccatatatttgtcttgtttttgtcaaaaaacacccatccgaggaacatataaagtaaccatttcagtaaaaaataggcaagacagaagccgacataaatccccaatagcaggagaggggagaccttggtcatcagcatcggacatgtatcatgaaaataattgaagaacacgatacctgtcaatacacaggtctgcactaccagtacgaggagatagcgtacatcggctgccgtagaactatcaaaaatgcttgtccgctcgcgatgcagtacaaagtctttcacctgttgggtgagaaacttctttccacgagccagagcgatggaggaaagaaagaagcaggcaagcaatgtcaaggcaatcacatcatccgtacggggagagtaggagatagggattccctcgaatccggagttcagtatatcggctatcatatggctgcaaatttacggatagaagcgtcccatacgggagttgtctgaagtaactccaccgcttcttccggtgtttgtgccactttccatatatcaccgtgttgctggcgcatgaagttttcctctatggcccgttcgagcatttggagtagcggatcaaaaaagccgtttatattcaagatgataatcggattcagatacagtccgagctgtttccatgtgatgatttcaagcaattcttccaaagtgccgcatccgcccggcaaggcaatgatgccgtcgctcagattcgccatcttctgcttgcgttcgtgcatggaagtgacttcgatcaattccgtcaacccagtgtgatgccagttctgttcgaccatgaagtgggggataacacctgtcacttcaccgccattcttcagaactgcgtcggctacggagcgcatcagtccgatgcttccggcaccgtttatcagacggatatgttgtttggcaagcaggcggccgagtttttcggctgcttcaaaatatacgggggctatcttagtgctggatgcgctgtatacgcatacggaatgtatctgattcattgtcttttgcaagtttactggatgaatgggtacaaaagtacaaagaaatcatatacatatcaaaatgaatgtgcaatttatgtcaaagtgaagatagaagaataaacacgaaggcaagactgcatattctatttctataaatagcacagtcaagcctatattctcctacttcaacactcattatttaaatattggcataaaaacagaaaattgaatatttcgtgaagttacttttccaacaccactagtattcatcagattgcaagtaccttgtttataagatagttgtagttcaagccatttcagcgtataactaactcttgccacaataggtatatcgatcgcattttttttgctattataagtagatgcacccaatcgatttacataccaagccacatctgctccgactccaagtctaaaattagaaaaacattcataactgaacacagtccctattgatagatattttccgtttacactatacttaggactatccgaattgaaggcttgataatcagtcccctgcgagccaaaaagagcaatgccatccattgcaaatttacgattaccccaatactgccgataagcatatccaatatgataatgaagtttatatccctcaaaattactggaaaccacactcactttttcatgcaatgttcctaaagagcctcctaaaacaggaccatgttcctgtgcagataatgatgctgtaacaaatagcaaagctataaatattaaattagtaattgttttcattagaagttcagtttttattatttaatatacaaatgatgaggacaaaagagtttatggttgttgctactttcgtcctcatttacacttttataatctcacagtggcaaatcctctttggtcatacggcacaccccgagaccagatttctattgtacccgtacactcttgtgctaacttacgtccaaaaactttggttacatttccacccatttctttggtatcaatagcaaaaggaataccatctttatttacatacactggaccataccccagtagttctccttgagcaaactcaaaaccacgaaggtttactttagcatggtatgtcgtagagtaacggctccatccaaagactcctttcttttgcgaagtaaaattagcatgtattattcctgatgaaacagataaatataatcctacttttctatctttttgacgactatatgcttcgtttatagaacttaaatctgaaacagacgaacgagtagaaaccgtaaattgttgttgacgctctttaaagtcagtatataccttatccacaaccaaagaatcgccaatcataaattcacctttcatattaacaaagtattcattggctacataaacaagccttgaataaggtgacagatcagtagcatcgatagtattaaacataaatacatcaccatatttatgtttatatttctcatatagaacatcaaactccgctttatcagcagcttgattacagattttatccaactcaccatccgcttcttgcatcagaatcatctgagacttaaaagataatgaattaagaaaactaacttgttctgaagtagacattgcactcactttcaaaagagcattctcgtacgattccacatctttaaatttaatcatagtaccgtcgtttattacttctatttcagaattagcattcgtcggtttaaccatattcacttcctgttcatcattggtacaagaaataaatgcacctaaacatactgttagtgtcagtgttgaaaatagttttttcattgttttttcttttttagttaatatcaattcgtagttgcaactatctttatgctattttttatgactcaattatttaatagctttttctatccttcaataatcctgtactcaaaatacccttaccaaaactttgaccagattatctgctacaaaagtagagataatggaggtatcgacctagatattcaattcagtaataattcagaaataaaaaatgccatttgatctaaaaactgaattatttctgaactcatccatactaaacaatcagacaattagcctttaatttgcaaaaaaaataaaagaacgatcatgatgaaaaaactactatttattgcaattattgcagtattaggatgcacagcactccaagctaaaaatcgcatcagaataaaaagagagtcttgggaagtaaaagcaagtactagagtgccaatatctcccccccttaatctttactacgaagggagtacactctttattcatgctaatatagatttagaaaacattataattgaagtaaaggattccttcaacaaaactatctacctagaccttacaagtattcaagctaacaatgaacatgtatttactctggaaaatatatcttccggagaatatattatcgaaataaaatccggcgaaaactatattatcggttgttttatattataagtcttgatatatgtgtatatttgcgcaaataaaatcgcaatgatacatacattcaaatgaaacaaagacgaaaatttatactattctatttaagcattatatgcctattctcatgcactgccccataccccaacacaatactgcgggtggaaaatattattaaagaatatccagatagtgcattaaccattttagactctctgagtgagagtatcacaaaggaatcacaatcagcaagaatgtactattacctgctgttaacagaggcacgtgacagatgttacgtgcctcatacgtctgattctctaatgttatccgtcactgattattatgaaagagaaaatgataaggacaaactgataaaatcctattattacacaggcagagtataccttgatcttcatgaaggtcctacagcactttcttatttccacaaagcttttgatatctctacagatagcaagaactacgctttattggggcgaatatacagccaaatgggaactctatttgcctatgaaggtctcacagaggaagtactacaagcttatcgaaacgcttatcactacttacaactaggcaaagacagtcttactagcgcttatgcactacgagatttaggaagagcattcaatttacttgagataacagacagcacaatctattattataacaaagcataccaattagctaatagcaatggagacatacaaagggaagtaaatattctcgaagaattggcaggcatctatattcaaatgggaaaatatgacgaagcattgaaaacgctacaagaaacaaatagtaaatggcaagatgagaaagatataaattatgatgtttggggaaatttctatgtaagtataggacaaaaagattcagcagcctattacttcaagaaaaatataggacataataatgtatattcagacataggagcctatcggaatttatatgaaatagaaaaagaacgtggcaactatgaagaaggattagcatatctggagaaatatacagaatgttctgatagcatttacgacatatccaacacagaatctttgcgaaaaataaaggctttgtatgattaccaacatattgagaaagaaaaagaatatttgcgcaagaaaaatgcagaacaacgagcatggatcatctttattgttattgccatcgttttaggagttatcatccttattcgatataatagaaacaggaaagctatgattcgggaacaagagaaaaaacttcatgagattaacgaacaacaatatcggaaaagccaactatatatagaagaaaacaagaaaaaaattgaagaattaaaagaaaaggtaaaatcgttcgaacaggaaaacaatgatttacaacaaaaacttttacttgcaaaaaaggaaaagctagaacaaaccaatcaagctatcgaaacatcacaaagagaacaagcattacttgaggaagcgcttagaaggtctgatatttatgcttattgttatcgtgcgatagaagattcctcgatcagactcaccgaaacagaatggaaagaactagaaaatatcattaatgatacatatgacaatttcaccaacaagttattcatactgcatccctctattaccaagatggaactacgtatttgtttactgttaaaaattaaaattccagtttctacaatttcacaattggtatgtcgtacacaaagcgctgtatctatgagcagaaaacagctttataagaagatattcaataaagaagggacacccgcaaacctagatgacttcattgtctctttttaaaaagatgaactaaatctctgatattccacacaaagaagaaatacccgcattcagaatcttcagtttcacccgcaaacgccctgtcggaaggggatagcggctgaaggcacagttttacaactccattcttgaagctttatgaagggagtaaggtgcttcagtcctttcagtccccaaaaacaatttcgaacttgataccgttcaagatatcagatggtacctctcagtgtgtcagaaagtaccattccgcaggtcagccagtaccattccgcaagtcagccagcaccattcaaggagttggaaatctccccatattttattcattcctacacaggctttccgctaattactatccgactcactgtgtataatgaataaactctgccaacagttgaaatagaacctgcatttacctcaaacagagcctgtattcaagataaacagagcctgtatccaaggcaaacagaccctctgtttgatcagaacacactcttcgcttgattgatctgaaataagccggcagctcgccaactttcacctcggaggcgaacagactttagctcggcgatgaatgaagttcagctcggggcttacaaaatttagcccgtatgtcagggctgaaagaactgaaaccacctgccccctttcaaagtatgtcagagacggggttgtaaagcagtgttttcagccgctatccccttctgacagggagcttgcggacgaaactgaaaaagctgaatgcagattacaggataataatagcatagagtaaaagtcatacatctttcattcaattgttgtacatctccgccccaaacgttatacatcatcaacctaactgtagtactgaaacccagtaactgaagtacttctcacaaccaagtcatgtactatataccacaacccatactttgtgtcagaaatcaaatatagtcatctgctgtttacaagtttgtcaaccgcaacaaatataacgattttattaatcataacttataaacagttcaaattcaacctatttataagtcgtaacttatagcatcaccccgaataacaaaagccgcaactcatctctcccgtataagaagagatgaaattgcggctcactatggactaaatagccgtaaagctataagctgatttcaaataatattacagaccaaaagctgccttgatcttatccacgtagtccagtttctcccatgtaaagagttctacttctacggtcttgttgccctcatagcgggagaagaacgttttcgataccacttgcggctcacgtcccatgtgaccataagcggcagtttcctgatagatcgggttgcgaagtttcagacgctcttcgatagctttcggacgaaggtcgaacaactggtcaatcacacgggcaatctcgccgtcggtcatattcacgtggctacgtccgtaagtgtccacgaagatgttgatcgggcgtgctacaccgatagcatagctcacctgtacaagcatttcgtcggcaacacctgccgcaaccatattcttggcaatgtgacgggcagcataagcagcgctacggtctaccttgctggggtcttttccggagaaagcaccaccaccgtgggcgcctttaccaccgtaagtatccacaataatcttgcggcctgtcagaccggtatctccgtgagggccaccgatcacgaactttccggtcggattgacgtgatagacgatctgatcattgaacaatgccagtactttatcatgatggatagaagcaatgacacggggcatcaggatttcgataacgtcacgacggatgatagacagcatttcttcgtcagctttgagctgtgcttcggcagagtcatcagccggctgaataaagtcatcgtgttgcgtagaaacaacaatagtatcaatacggacaggagttccgttgtcgtcatattcaatcgtcacctggctcttggcgtccggacggaggtaggtcatcaccttttcttcgcggcggatatcagccagcacctgcagaatgcggtgtgccagatcaagcgaaagcggcatatagttttctgtctcgttcgttgcatagccgaacatcatgccctgatcgcccgcaccctgttccatcgggtcctgacgctctacgccacggttgatgtcgggactttgctcatgaatggcagaaagcacaccgcaagagttactttcgaacatgtactctcctttagtgtaaccgattttcttaatcacttcacgtgcgatgagctggaggtcaacgtacgctttagttttcacttcacccgctaatactacctgtccggtagttactagtgtttcgcaagctactttagaactggggtcgtaagccaacagtttgtcaagcacggcgtccgatatttgatcggctaccttgtcggggtgtccttccgacaccgattcggatgtaaataagtatcccatctttttaaattaaagattataaattgaaaattaaaattgggaaaataaagaggggaggaagagagctgcggaagcattgccgaaaaggcgtcaacaagacgtgttttagcatttttttccgtggttgcaagctgctcaaatctgtccacactttcatttcggggacaaagataggtattattcggagattatatttatctttgggcaatgtttaacacatatatacaggaaattggtatgagaacaattacattaatgcaatatgtattttccattatccttctggtcatcatcttcctcgtcatggattatttctggaaaggagacgaattttcatggacgtatgagtttgcaaaaggaggaatcggcggaactatcatctgccttctgaaccgtcatttattcctccgccatcctaatcctaaacagaaaaaaatatgattatcaacaataaattaagaactctttttgtactggcgctttatataggattcaccattgccatttacgccattgtatgccacttcctgaagattgagtttcaggatattcacttgttatatgcagtattggtgggctgtgtggcttatctgccgaggtttatcgccgaaaagaaaagtaaaaagtaaaaggataagcaaggggaagagaatgctgtattatttttctatctgcgccagcagcaccttcattgcctttcccaataccggatgcaccagttcgggggcaatctccgttaaggggcgcatcacgaagtcacgttccgccatcaaagggtgggggaggttgagtgctgctccggaaggagaagtaaccgaaagtatcagatcatcataaagcagcaggtctatatcaatcagccggtcgctatatacgccaccgacagacttatgcgtacgtcccagttcccgttcgatctcctgcgtcttctgcagtacttccagaggcgacagttccgtttctacacacgccgccgcattcaagaaactatgctccgaatcgaatccccaaggggcagtgatgtaaaaagcagacagggaaatgactttccctacctgctcctctatcttttgcacggcagtccggagattctgttctttatctcccagattagtgccgagacttatatacactttcgccattaccggtctattctaccttaaactcccgctccctgtccaaaggaacaaagaactctactttgccacatttcgggcagacgtataagtcgaatgcttcgcgattctggaataactcaaacaagtttccaaaaatgcccgtgttcattccttcatgaaactcatattttccggaataaaccatcctgacctgacaacgcagacagtcgatagaccgcccgctgtcatcactctcttccgccggagtcatatccaatatcttatcgtccggaaagctgtaattacagttccagcagatttcaaagctatcttctacttcttcgtggcatttgggacagattttcatagcggtatcttttcgtttatttatccagaatcagcatcgcatcaccgtatgtaccgaagcgataaccttccttcaacgctacatgataagcatccatcacctgttcgtaaccaccgaaagcggccacaatcatcagcagtgtagacaacggcatatggaagttggaaatcatcgaattggccacagtaaactcatacggagggaagataaacttgttggtccagccttcaaattctttcaaatgtccgtcggtgctcaccgcactttcgatagcacgcatcacagttgtacctaccgcacacacgtttttacccttatccttggcacggttgaccgtattgacagcttccgcgtttacaatcatctgctcggagtccatcttatgcttcgtcaagtcttctacgtcgatatcacggaagttgcccagaccggcatgcaaggtgatataagcgaaatcaatacctttgatttccagacgcttcatcagctcacggctaaagtgcaggctggctgtcggagcagttaccgcaccttcgttcttggcgaagatggactggaaacgttccgaatcttccggctctacaggacggttgatgatggaatggggcaggggagtctcacccagagcatagagggctttcttgaactcatcgtgcggtccgtcataaaggaaacggagcgtacggccgcgggaagtggtgttgtctattacttccgctaccatcgagtcgtcggcaccgaaatacaacttgttgccgatacggattttacgggcaggatctaccagcacatcccacagacggagttcttcgttcagctcacgcaacaggaatacttcgatacgagctcccgtcttctccttattaccatacagacgtgccgggaataccttcgtatcgttgaatataaatacgtctttatcatcaaagtagttcaaaacatccttgaacatcttgtgttcaatctctccagtacgacggtgcaacaccatcaagcgcgactcatctctatacttcgtaggatgcaaagcgattttatcctcgggtaacttaaatttgaattgtgatagcttcatatctattccttattacgttaattattatcttcgtcgttttctatttcctgccggtcgatccactctttaaagtgttcggggtccaggcaatcttccagacggacatcccccacacgtgtgcggatcagttccgtcagatgggctccgctctgaagcacttcgccgatgtcacgggccagggcacggatatacgtccctttgctgcacaccacgcggattcggatcgtcggttccggatcgtccagacggcattcaagcaactctatctcatcaataacaagttgcttcgcctttagttccacctcttcacctttacgtgccagctcataagcgcgcttgccgtccaccatgcaggcggaaaaggcagggggcacctgctcgatggcaccaaggaagtgcgtcagtgtttcttccaccagctcccgggtgatatgtccggtagggtaggtggcatctatttcatgttccaggtcgtacgagggagtggtagcgcccagccggagcgtggctacatattccttggtatgatactgaaattcttctattcgtttcgtagccttgccggtgcagaggatcatcactcccgtggcgagaggatcgagcgttccggcatgacctactttcagttttttcactcctatccggcggcagatatgatagcggacgtgtcctactaccttaaatgatgtccagccgagaggtttattgaaaaacagtacttctccttttttaaaattcacgttatagagttataaataacgagttgtgagtgggagtaaaatgacccacgacttacaactgcgtaataattaccgccaatcccgctattgcacaatagatggcaaagtagatcagctttcctttcttcacaatattaatcatccacttgcaggcaaggcaaccggctacaaaagccgccagaaagccaacaatcaatgataacgcagggatatcccctactacatcttcacctttcatcatctttacactatcaagcaacgcttccccgagaatgggagggatcaccatcagaaaagagaactgcgccagttttgccttgttatctcccaacagaagtcccgtagcaatagtagatcccgaacgggacagccccggcaacaccgcacaagcctgtgccagaccaatgataaaggcatctttcatcgaaatcttatccttttggcgtggcttataatagtacgagaatgacagcagggcagcagtcagcaacagcatacagcctacaatcatcagtcccgaaccgaaaatagcttctacataatctttaaagaatacgcctacaataccaatcggtatcatcgaaatcacgatattgatcacataacgagtctcatcgttcatctgaaacttgaataatcctttgaaaatccagtcaatctctttccacagaatcaccagcgtactacatacggtagctacatgcacgacaatcgtaaatgccagattctcttccccttgtatcccaaacaatgccgatccgatggccagatggccactgctgcttacaggcaaatactctgtcaatccctgaatcaatccgaggatcattgcttccaaccaactcataatttctttttattattcttttgttttaggtttacgcaacactgcgtatatcatcgatataaagccaaacaggcaaacaacaggtgctaccttgattctgcgtacactgaaaatatccggttcgaaaaccgtttcggacgacgtaggtcccgtcatcaatagaaatccgataatgacaatcgccatccctatcgcgagcaagataaagttcactttatcgaaggcaaatttctgtttgtcagacataagcttattttgttacaagttactaaatttccaactatatgttattctcctaaatataatataaggtattggctttcatcctcagatatttattcatcgagatgtaagcacacaaccacgttatcactattccgaataccagcacgctgccgcagacaatgagcatcacttcgggtgtgatgacctgaatcagctcctgctcgtacgtcaccgcccagtaggcagttcccatcagaatggcatcggcaagcatacctgccaatacgccgctccacacgtttttccgcaggaaaggtccgcggataaaactccagctggcacccaccagcttcatggtatgaatgaggaaccgcttggagtagatggcaagccgtatcgtattgttaatcagtgcaaaggatatgaaggtgagcaccaccgccagcgccagcagcacaaggctgatgttccgtatattctcattgacggcatcgatcagctctttccgatagagcacatcctgtatgttagagttcttcttgatcattttctctatcttcgcgatactgtcggaattggcataatcggagtgaagtttgatttcaagggaggccgtgaaagggttatagccaagaaactcttcgggatcggtgcccatcgcctccgtctgctctttcagagcctgttttttggagatgtactcggactgcttcacaaaaggttcctgattcagtttcttctggagtttcagaatatccgcctccttcatgtcatcactgataagaacggagaaactgatattttcgcggacgtatacagacatattgtgcgctgtgagcacaaagaacacaaccagccccaacagcagcaacaccaatgtcgtactgatactggacgttatgaattgcatatcgaacagtgacttcgacttatatctgtttttatttcccatgcgctatctttttttccggaatacgtaaatcatcgaactgctccgttctttccgccccaacgtgctgaaccacgcaagcgtccccacatacatccctttgaggaaactgcacgaactgccgcgatgtttctcactcaacatcgatacatagaacgcatcaaacggcatcggatgacgagccgccataatgaatccatgacgggaagccagctgctgaatagtgacgggagtgaaatgccagagatggcgggggacatcgtatgccgcccaatattcaccataacgtcctgcatcataggaagaacagttgggcactgccacaatgagcatccctttctctgtcagcagttcacgaagcatttcccatgtttcattgaggtgttccagatgctccatcacgtgccaaagggtgatcacatcaaaactgccgggagcaaactcctgcaaagcggattcgggttttacgtccaaatcgaaatgctcctttgcaaaagcacgtgcctgcggacttttctccactgcttccaccttccatccacggcgtgccatggtgtcggcaaagtatccggttcccgtcccgatatcgagcaaacgccctcttttacggtgtgcttctcttgctaccagacgcgctttgcgacccagcatataggaacgtacataatggtagatggtattcatcgcgcccttgcgcgtatcagtgtgggaaatgtaatcgggagtctcgtaatacttgcctatctctgcttctaccggcacaccttgcgtgaacgtaaatccgcagtcttcacacgaacacagttcaaactgttcgcccgaagcataaaaatccgtacaagtcatgacgcgtttcaagtgcgtactgccacacaccggacaagcatttataatgagtttctccattaatttctaagcaaaattaagtgctgcctcgattcacaagacaacactattcccgaatttggtgcaaagaaacaaataaaaagtgatggattgggctttcgttaagtacttttaataatataacgttactctgacacttatttcaaagtgtatctcaaaacagagaatgaaattaaatgtgaatcaacttccctcaatcagaacagccatttctcagtacatgaagaatggataggaatcatctcgtagaatcagaaatatacaacacaagtacggactgaacaggaaaaacggaaggattcgcgattggcatatttccgaatcacacagattttactttatagcgatcaataaaacacagataagatcaaaaacataaattccgaatatgtatttcatcatttaactttcaatctaacattttcaaactcttctgtaactgacgacatccggagcaaaacaagcactcaaagtacctttttacccgttcctttaaatgaagcgaagtgcttctcaccgaccaacgagtcgttcctttaaaaccaacgaagcttttctttaaatgaaacgtctcctaacattggtagttatcatgcatatttcacctatttatatccaaaagcaagatcattcctgcatattcttgcagctttttatgcagtatttcttctatcaggataagtctgaacatcccctttttaaaagtaatcttcaaaatagaacatataatttgtgagggtattcatgcgggaacgtatcttctaatttaataggctaccacaagctatgatatcaattacagcggattttttctccaccattaaaatatctcaaatgaaaattctagttaatttcagtgtcataacctatttgtgtaaaagctgatttatctaattacttatctttgatgtatacccatattcgtggatcttgtccatgatagccatcaggcatatcatctggatatgaaatacctaatattctactaactctcttttcactcagcgcttttttcccttccaaataaaaaagaatatatttatctttgtaattcatagcattggtaggtaaaatttaccccctgacaggcaactgccaggggaatagtcaatactattgatacgtatatcaaagaaataatcacttttctcataatcaccaaaatgaaaaatttactttatttcaacccatcctctacttcaatgaataaattaagtgattcatctatttcaagatccacaaccttttgactctcgaaaagtcaaattgttcgtgccatcaaaccatgacagctgtaatatcatcttctgatgtagcaattcattttccatctttctgaacttcccaatagcaatatgtcattatacgattcccactatcaaattccataagaataattgagtaattacctccatcagaactactatatacgatgttacaacctatattcttttttaattcagtattaaaattcatattatctaaataaatcaattttcacatagctcctcgaataaaaggtaccccaacatgagtatatatatcgtttcatgtcagggtaacacttattaatgcaagaggccaatctatatcaaaatatctataattatttcatatttataatcttccttatttggaatactacaaaccagataataataataatcgtaaataaatgaggtataagttctgtaccataataccaataatcatcttgcatatctgagacatttttaaccatagtcccaaaaacaaaattaattaattgaaaaaataatgcacctaaacttagtagcactgcaactactctgaaaataattttcaatatgttattgtccataatttatttgtatatttggattttgtattaaccatgaatctaagattggcataagttgattccaagttataccattgttagcattccaaaaacttccactatcaatccaatctctatgcctatattgatacccttcattgcttttctttcttattttataattcgcattaggaatatctctgctaccatctattggaagacttaatccttgtacccaatcattagtaatcgtagcatcaatcaaaaatgttccaaccgagcccatcaattcagaaggcaaccatgtatttagatgaattgagaaatcaacattccaaccttgctcttttaaatatcgaataataccttctgaaaaagcacctcccatactatgagaaataattcggaatacatcctcttgtggattcatacccattatcaattgtttgtaattttctttagcatatgcatatccatctaaatttcttaaaaaggtagaactacgcaaatagttaaaatcaaagtcggtgaaataggcactttgatcattaaaaaagttttttgcacctttaacaaaagaactatttactcctccccaataagtgccacctcctctaggagatccaaaccctaaatacccattaacaaaaataatcttctgcccatcggggtcaatacaattatgtggtgtatttaatccatatacatacgaactaattgaataatacttctcactcatcggatcaaccgcatgccatctaccaagcgctgcatcatacatacgcgccccataatcataccaatcaagaccattcttcctatcaagttctttaccgttatacttacgaatgtttatctactaatgtactctctgcaaatgacacctcataaggataatagtgattagtccggacaactgttccatcaaactttgctaccacacggctattaccctgatgatcctgaagataaaaagaatactgcccatcttcaatatagccaacttcatttaaactgctgtaattctaatcccacttaaaaaaacgtcgtattctctcttctttatcataaacccctttattataaatataccttaccctttttgataaagaatctcttaagtcactcgaataaactgcatcattatgcattattctaaatttctgtgggatattattaatattcaagaagcaaaaagtcgaatcgctaaacagcttatacatagacatccaaatatccttatccggtaaattctgaagaaatgaatggggaggttcactatcatatttcaaggatttaaaatcatgaggggcaatagcaactgaaagtgaatccctcaaaaccaattttaatgtatccggtccatttattacagcatagcacatactcctcgctgaattcctcgataatagcaaaacggaatcagtctgatttcttacaaatatttctcctgagaatctttctacataattcttcagactatcaatctcaagttcaaaaaggtccggaatatatgaactgggaacaataatatcgtgcgaagtcaatcccatcaatgcagttttctcctggggtatatctccagaaaaatacgaccaaagttccggatattcaaatagacgataataattaggcaacatctttactaagatatgtttatcttcatattttcgaagagccaacagccaatcacgacctctgtttaaacataaattttcatgaaagttagagtccgaaacaaaacctctctcaaacaattctgtgcgtgacatttcaggctcatctaattcgataaagcaaagatatctttctttatactttatcactctggaaggtaactcagcaccatcagaaccaggagaatctgattcaccgatataataaagtgaattagaatctgtcgaaaacacttcatctatttctatatatgtcgtaagtaaatagccactatctatcagcacttccacctgttttgctacacgctgatgaatatcttccaaagaaggggagggggatatgcatccccccagtataataaatagaacaacatagactaattttctcataagcatatcatttacgttttatatattgcaataaatctgtagcatcatatacacgaatagaatttacccgacttgaatttttggtatattcatatatcataccctttttatcagtactcacacggttatctttcatatacacagcattcttacgttgtggcttagctaagttaaaatcattaccagctccacctttcgttcctccgagcaaatgagaatgaatatctataactttttctcctttcacagaaagtttattttgagcatatacaccattatctaccccatatggatctcgatctgtcgcaacaacagctgttcttgtaccattatcatcataaacatctaacttccattcaacagttgtgtgatcagcagcaaatttaaaaacagtagcagctgtctccaaatcttgagtacttccataagatttcttcacccgattttccttctgctctttcgcctgcatactatgtatttccccaagtaacccctgatttacagttactgaaatagaacgatcactggaaagatataaattatctgttgagcctttacctctcttatcaataggagtctcattaaataatcttcctgatctgctgataacataatcatcctttccgtctaagtctatcctcaacacaggattgttcttacaataagtatacggactccaactataatacttctcactcatcggatcaaccgcatgccatctacccaatgcagcatcatacatacgcgccccataatcataccaatcaagaccattcttcctatccagctccttaccgttatacttataaggctgcacagcattacttaccgaacttgatagcagaccgccaaacggataataatggttcacttcttcaacattaccactctggtctacaaccacacggttattacccaaatgatcctggacaaaatagtgatacttagaatcggccagtgtaacatagccagcttctgtaagcaacttgacagggattccattttcatagatcacattgccgcaataatcagttactgtagtatcactccctatgatatgcgtcgtacgaagttttattccatcagcatcataaagataagaaatgacatgaccgttttcaaattctatacgactcggtaaatttataaaattatattggatattcaatattttcttgttcaaatctttcgtcatattaccattttcatcatattcatattcagcttctttgtttactccgtctttgaaatcaaagccattgccgtaaacagaatttgtagccctatctgatactgattttagttggttcccattataggacattgccagatcatctatcaagccgtatccggtagatgaagtctgtccggaacgtttgatccctaaaatattactcatcttatcgtatccggttacttgttcattgaagcgattctgattttgaacgagaacactgccttctccatacaccgcattcgtcaaacgattcaaattatcataagtaaagtggtagcctctcattatatcatcttcacccgatttccaaaccatactgctgatattaccattgtaatatggaatacccgttccgtccgtataatgcaatacttgctcaaaagatgaaccagtgataccagttagccaactacgaatattatacgaataagacgtattcaacagaccgttatggaacgtcttccgggataagcgtcccaaatcatcatacacattgtcaataagaatcacttcctgagcatctcccaaacgatgcagcgcctttacaagacgttcggcgtgatcatactcataggtataactgtcactcaaaatctcatttccagccccggtctgacggtgtaaatgccgcaaggcgttcccattaaaatcataggaaaagaaatcacggtccataccacctaaatggttgtcagaaacagtttgagaaaggcgaccacgatcatcataatacatcactgagtaattgtagggagaatccactccatattcaccattacgatactgatcgtatgcatccgtatgcaacttagctattcctgtcaacattcctttagcactggatgacgtagcggcaaaaccttcttcatgggtatatctaaattcatctcttgccgaaagatctgtccgatacataaagtcatagttatcataataattgattacctgaactaatggtttcggccccactaatcctgccataagacttccactaaactgataccccccatattcagtacttcctacgtattgacaaacataccaattcgacaatccactaaaaataggttttaaataaggattatcaaacggatcaatcgcaactttacatactccctgcaagcatacacgaccgaatgcatccggaatactaaatttccattctcctcttttacgttcctcgccattctggctaaatataagattgttgtttacattatagacatagtattcccatgaaattcctggaagctttttagccatgaggtttcccgccacatcatatttatacaaatatccatacatatcgagtttttctgcaggaatattacctacactcaactgatcggacaatgcaggaggaagaacagcacaaagttttcccaaatcatcataaatatagtaagtatccgacaattgcttatcccctttcagtcttgattctatacgacgttccagaacggttctttccaaacggtctttaaattcaaacaaagtgactccatcttcatcctctgagcgtgtaacaagcaagcttccattttcatactgtttacttacactaatatttaatgcttctcttgccccattgatcaattgaaaaccgaaacaacctaaagtatcattaccagcgatattaacgtactcatctattttcaatgatctgccattttcacgccatactctccccggattatgctgtttaattactttttccaaaggagaattttcgtaggtaaaggttaaatacggataagcatctcctccataagtattgcgtgccaattctccacaagaagctacagatatgaaatcacctgtgttttgtgtcgttacagctggcaaccatgtattggctttacgcccccacccatcatattcttgtagggttactaaatctttatgactaggactcacaccttgttgtaccgtttctttcgaacgccccagcccatcatagtaattaaccacaagcataccttcttccttatttcctgtcctactcttgaaaacagaacagcatttttgccaaaacgttcgggcaatagatcatttccccaatttattgcaggaaaaggaatagccggcatcggctgttcttccggagcaagtccttttgtctctattgacagagtcatgatataaaataaaggaagtggtcgaattgagtccatcggcaagaccggatctattggcggaaaaggatcaatcggcggaaaaggatcaatcggcggaaaaggctttattggttcatgcgggtcgatcggtttaatatcaaaagtattagttttcaatacacttgcagcattcacaccattatcatcaggaacaagaatatctttgttcttttctattacagtcgatgtcaaacaatatgtaccggcaaataacaaaagagtatcagtgaaactcactgatgataaagaatccggatcaacacttttcgcattctgataatacacctgattagtgagcaaattatcatctgttatttttaattgacattccaattgtcccggaactttctccatttccattcccatagtgaaataattagacttaaaagaaatatataatggttctttcacacgaaacaagtagtttgcgcaactcactgacgatgtatcagaaatgtttatatggtccagatgttttgttttaaccatatccctcttcaacgtgtcatattcgagcttacctatctcattctgcaaagaattctgcgcaggtatttctatcgaaaatcctgatagcaaaattagaagtaatattattttatgcaatttcatagttgtcctcctttctctatggctacttctccactttcaatcttggagccataataataattgtaatcatatatatttaatatccgtttttgataatctccatctttaaattccataatataattctctgtcaggcgacccagaaaatcatatttataaaacacagtgattccattaggctttgtttctgagaccaaacgcaactcatttgtatatttgtaaatatagaaatgcgttccggatatcttatgcctgatattttctatttttagcaaattagttgcagagatatcggatgaagagaaatccttcacattcattcccaatgcttcttccacttgattaagagtggcattttctatccgtgatattaaccgttgaccttcagctccccatatcaatacaacgggcgttgactcttcgtgaagatatataggattcccataaccatccacagcctgcacagtgtaatgtttatgcacataaccatctctatctgtactaatctgctttatataaggtataggacccatatactgatatacctcttttaaataagagccgcctgtctgttcttttttactagaaaccggagatagtatatgtgcttcttccatccatttatattccggtaaagttgcagcataaacatattctgtcagagtactttttccatcgctgtttctaccggctatttggcttaactgcttatacttattatattgatacgccttttctataacaaatgccgtatttcccgattgaggataaagagtttctataacagagtcggtcagataagcatgtgtatatgtacgagttaaagtccccacttttcctagcatgaaattgtctaaatctgtacaaaagaacaacaccatttgatcagctgttacaaatgagcctggagttacctctttgtatcggtaattcaccttctttcgcaaacgatcattgacatcatagtattcttcagacaacaactttcctctctccatagaacgactgctaaatggcattgtataagagttcccttcaaacatagaataaaaagcaagctcgtcataatgagtattaccataaatatcctcattatagttagagtaatgacgcacaatataaccttgcgacttattatctttgtcgaacgcttcttcaattacacaagaataacctacatccggtgtattcagattagtaactgatgggaaaaaacctccctttgatttgagatataacgatattgcattcttaggatcaggctccttatctccatccttaagagtatacaccatctcattaacaggaagacttttcaatattccactactttttccaaatcggtcacgggtattcgaatagtaatattgcttggcaccaagcacattatcttcattatccagattggtaatacgccgaatacgcaaaccgcctgcagtaccacttttgtctgttaatgacatcaaagaaggagctaccacttttgaatagttgttcaattcatattcaaaacggctttttccacctgttggataaatgacttccgtcaagacctctgccaaagtatattgcaaactactataagtctgagaaaaattaggtatctcggcaaaagcaacacttcctcctgtataatatccccacgaatcggcaatcgggcgtacataatcatttggcatacgtttttccgaattataaagaaaacgatattcaggtacgcgacctccggtcaaattctcaggtatattataccaagtaagaaaataaaatccatgtgggtgccatacatagttagggatcaaatccggattccctgaacgttccgtaattaaagacaatttagtacgattattccttgcatagtcaaaatatatagttttcaaagccttggagttctttcctttcacataaatacaatgaagaattttatgttgtagttttgatttaatcgattgacgcaatgttgcctgatcggtattatcaatttggtttcctaaaaacagagtaaattgattagccgggtcttcaaaattcatgttatctatatcctgacggtcataatttgcattgtctttccatgccaaataactatcaacaaacttatctccatatccgtattcattgtaataattgaattccaatatctcgttaggtgtttttatagtctttaaattaactgggaaaagcagatacccagtcatccctgaacgcccactttgtataccactataagtgcatggtatgttggtcaccactttctgttggggtacataacgaagatcacacatgatagctgaagtgtcataactgaattctattacccgcttgtctacggttgttattttggacaacctccaggtagtagctattaaatcactgttatagcgggcataataaggaatactatattcagtagcgttgattccaccaaattcatacctgcatccatcaggagtaatcagcgtaaatttattgaaaaaacgattgtttcttgtgcttgctccccatctacttacatcaagacgttttccgacttccgacaaactaagaaagccttccccatcaacaggattaaattccacacgtatatcctgatcagaaacaacattccactctccattaccggcatagtagaaatttccagaataaccacaaacactaaacgaaaattcgtcagcagttaattcataataatcattttccgtgctttgtatatgcatcgtttctgctttaaactgttcattactgatatttttcaatttagaagcatgtgcataataacccggagcatatccatttgattgacatttctcatcatacattccacgaacagaacgtgtaatatagccgcctgctataagattccatccaagtccaagacaaccagactgggaattaggctttaccgaagccaaatgataacttgcagcaagtgataacgaatagttaccagctttcaattcataaataggcacggatatatccggaactcccgtatataaactaactggaacttttccatattctcccaaaccggctatttccggactgggtacatttttaataggtatttgttgctgacctatacagttgaaactgaatattgccagaaaaacaaatactgatagtagtctttttttcatattctttgatatataatagtttcttaaataaaatcacaatactaagaaactccctgcccgataaagtagcgcgcatattcccatgacagggagttcccgttaattacttctcttacagattcatcgcattagcacccaatacgcctgccacagccgacgctaccgcgataaccaccttcaggatcatatcccatacagatctcttcattgccatcatttacctcctttcttgttctttaaatagtttagtttactctgtgtttcttccgtgtcttctgccgcaaattctttaaattcctgctcggcatcaaagcacggacacgccttcatccactcttccggttctatctctccattaccgttcctgtccggcgagagatcccgatgcccgcacacccggcagccggggaatacctccagcagctgatgaatcagcagccgaagcgtagcacgctgttccggcgtccgggtgtctgccgggcgtccccgacagtccagaccgccttcatagcagattccgatactgctggcattaaaaccttttgcgtgtgcaccgatgcgttcgacagggcgggtaagatgcaccgttccgtctttgcggatgtagtagtgatagcctgttccgttgaaaccacggcggcggtgcatcaggtccaaagcctccggagaaagcgtacgattcccctgcgtggcggtacaatgcaccacgatcaaattgataattctcatgtgaataagtgattactagttagttaagtttccgatttagtttagtcgttcgttcttatattttgtgttgtgacgaaaggttatactgtcgggtccggtgcttcctcaccacctccttcgccaccatcgccgccacccggcttatttgtatttccactgccggaagccggagtgtctgtacggtcgaagcgcacacacttcgcaccggtcaccaaagagcgggtagcggtagtccgatcggggttcttggtgaagttgggaaggaaacggaccgtaagagaagcttgcgcagccgacacttcttccgaagtctccacccctttaccgttggatttcatcaccatgcggaaagtcccgaaaccgtcaagcgacacgctttccgatgcttgtagatgctgccccatcacagtcaccaggttatcaagcgtattcttcacatcacccggggagagagacgagtaagcggcaatctctttagcaatctgcgaagtgctgatattagccgtgtatatcacacggggatgaaacatttttttgtgatttttgtcttccagaacagactggaatgacttgtacaatactgccataatcgtaatagtttttttgtgttaataatttcgtttagttttgtcctcaagcttaatgacattgcaaagataggagcattattcagactgacctaatcattttttcaaagtgcgttcataaattaattaattatactcagcaggtagtgcccgggcaatctgatctttccattgctcccccggatggtattaaatcctttccaaacagggtttccaatagctccgaagttacttttaagaataatggcatattgttcggaaggcggaactttgtaaagccgcaggttatctgtcagtccccggaagttacgctgcacaccatcgcatggcggttgcagacagtcaatatcttcctgtgtcacagccgttctacttttcaaatattttcctccttcatctcctccttgaggagggttagggaggtggtttactttgttttgatttatttttatttgttttcttttgttttgtgtacccgatgttgcaatttcatcctccattgttacagaatcggagcttgatgttaccgtacaggcggtcttgtgatcagcatcaccgtttaacgcttccgcacattcgctatccaaagaatcatccgtactacttttaccgctctgagacgaacggtatgaggtgatttcttccgattccagcaggcagtagtccggctctatcagcgcactgctacgccgcttggtgatgaaaagatactgccgctggatgtcggcggaagtcaagatgttgtattgccggaaaagtccgacatcaaacaagccatattccacggacagactgatgatacgcttcacatcatccagttccgtactgtaaaggctgtccacaagctcctcgtaaaattcgtcaccgacagagatataataccctttcccggcatagatgtacgacagcgtttccaccagtgtggcaaaggcagaatcaccttcacgtctcataattcggcgcaccatccgatcgtgcataaagctggtgctcatggggaaataatccagtccccgttttattcttcccatagcgtattcagtttttctttttcttgtttccgtgagatactttctgccacaacctgacgggcatgaagaataagaagcatccgcaaagcggggtctttcacctcggttatcaccggataagaaacaggtttgttttcaaatgatgtacatcgtctcaaatcacgacgcttgcgggtgtttgccttgcgacactccttgcaataattgtcaagggtcccggtgcgtttgtttgtataaaaggcctcatgcggtagctcccgtttgcagcacccgcaaatgtgcagagattgattcattaaaggttccatattgattttgcgttttaaagttttcatgcttaaatatttgtttatgtgattatcggacatatagttcctgcatattggggatatatggccagcgtattggatctatagctcctgtatgcaggatatatagatgctgtaaaccgactcaatatcactggtgttcatccgatacagaatcttccggaagggggtggatgaggcattttacaacctttcataaactttttgccgtttttcatggttattctatttttaatttatatttttgaaacatatttctaagtttgctgctacaaagataaagcagttttctcacataaaacaaacagttttagaaattaacgctaaaaaaattatataactgactatcaatgaacgaataagaagttccaacatctttacactaatttaaaacaagaataaaatggatacatttctagatgtttcgggaatagtaaagcgcgccaagcaggcgctcaactttaaaaaggacagtgaactggccagttacttaggtgtttcacgtgcaacattatccaactggtgcgccagaaaccggattgactttcatctgctgctcaacaaaatgagagatgtagacctcaattggctgctggttgggaagggtacccccagacatcaaaccaagttatgcaaaagcgatttagcaagcggtgaggtccagatgattcacaaccctaaaacagtagaggcgttggacgaccgcagcgttgccctatatgatattacagctgccgccaatctgaaaacgttgctcaccaacaagcgacagtatatggtaggaaagatacagattccaagcattcccttatgtgacggagccgtctacatcagtggcgacagcatgtatccgatactgaaatcgggagacatcgtaggctttaaagagattaacagtttcagcaaccttatttacggcgaaatgtatctggtttcgtttactatcgaaggagacgagtacctggcggtgaagtatgtgaaccgctcggaaaaggaaggatgtctcaagctggtaagctacaacgctcatcacgacccaatggatatccctttcagcaccatcaatgcaatggcaatcgtgaaattctccatccgcagacacatgatgatgtaatttgaatgacgcttcttttgctccggaaagaggaaaagggcaaagtttaaacgaagtgaaccccgaaagtttattgtctgactttcgaggttcatttcattttgaaataccttctttaatatattgcatgggctgactaaaaagtcggcagtatctcaaatctcctccttcaggaaggaggggaatttatgatactatcgattttttaatcagtcccgacatagagaataatatactagacttcttcgcctttcagcgtagccgaactggcttccgtcacccgcacattgacaaaatcgccgatacgatgcgtacctctgtcgaacaccaccacacgattctgctccgtacggccgaacaactgatcgcgcgaacgtttggaaacgccttctacaagcacttcatacgtcttgccgatacaacgttgattggactccgcggacagacggttctgcaaagcgataatctcattcagacggcgaactttcacgtcttcgggcacattatcttcaagatgcttcgacgcatacgtccccggacgttcggaatatttgaacataaaggcggcatcatagccacattcctccatcagagaaagcgagagctgatggtcctcttccgtttcggagtggaaaccagagaagatatcggtagtcagtccgcaatcgggaatgatacgcttgatagcggctacccggtccagataccactcacgggtatatttgcggttcatcagtttcaagatgcgggagctgccgctctgcacagggaggtggatatgcttgcacacattcggcacttgggcgatcacttccagcgtttcatcgctcatatccttcggatgggaagtcgtgaaacggatgcgcacgcccggagcagcttcggccaccgtacggagcagcatcgggaaggtaaccacttcgcccgtcggcttctcgaaccggtaagagttgacattctgccccagcagggtaacttccttataacctttggcaacaaggtcggccacttcattcagaatactttccacatcacggctgcgttcgcgtccgcgtgtataaggcacgatacagtaggtgcagaagttattgcatccgcgcatgatggatacaaatccggaaatgtggttgccgcagatacgcgacggaatcacatcacggtaagtctcggttgtcgaaaggtctacgttgatcgctttctcgccggcctctaccgcggcaatcagctcaggcaacgtcaggtaagcatccggaccgaccaccagatcgacatgatggttcgtaatcagatcatccttcacccgttccgccatacagcccagtacacctacaatcagggccttcttctttttcttcagcgagtggaaaaactccaggcggttcagaatcttctgctccgcattgtcacggatagagcaggtattcataaacactgcgtcggcctcttccagcgtttcggctaccgaatagcccgccatctgcatcaccgaagcgatcacctcactgtctgccacgttcatctggcagccataagtctcgataaacaacttcttgttgtcatcagcagttgcggatttaaagtccgctcccgttaattcgttcatattcaaatcctgttttaaatttgtccgcaaagatacggcttcgaaatcaataagtggtaaaatggtacgaaaataacgcaaaaacttgtagttcaggcattattctgataattaatgttaatgaaataaacatttgcggggcatatccttgctaaatttaattttatttttcacatttgtgcaatgaaagaaacattagattttttcatagttaaggtttaggttaaaaaaattaaggggagctgtgaagttgcccttttttcataacaaaatgttagctcaaaccagatataatacgtaactttggcagattaactatttagaagtgaaacagaatggaagattttttgaaatttctcctgatagcaggtgtcattcttgtgggaatattcaaagaggtgagcaagaacaacaagtcgaaaaaggctcagaataaacgccccgtcccgcctacaccgtctccggtcgaagtagatcctgatgctactcccatacccgaattctgggggagaggcagcagggctttggacgaactgctccagccgatacctatggaacaaccggctcccaaaccaacgccaaagaaaaagaaaaaagaagaagtatctgtggctgcatccatagcaaactgttccgcacaagataaacgaaacacgaagcaaggttcccactatgaccatccggaacccgccggtgaggaagatttctccatccattccgtagaagaagcccgccgcgctattatctggggagaaatcctgcagcgaaagtattaagtgataagtattaaccaacaaatatcaaccgcatttaacgcgaaattatactatttatgtcattcaatcgtatttcggcagcagaagctgcaagcctgatcaaacatggcaacaacatcggtctgagcggatttactcccgccggaactgcaaaggctgttacagctgaacttgcaaaaattgcagaagcggaacatgccaaaggcaacccatttcaagtaggaatttttacaggtgcttctaccggagaatcttgcgacggcgtcatgtctcgtgcaaaggccatccgctaccgcgccccttataccaccaactccgacttccgcaaagccgtgaataacggtgaaattgcctacaacgacatccatctgtcgcaaatggcacaggaagtgcgctatggcttcatgggcaaagtgaacgtagccatcatcgaagcctgcgaagtgactccggacggaaagatttatctgaccgctgccggtggtatttctccgactatctgccgcctggcggaccagatcatcgttgagttgaacgccgcacacagcaaatcctgcatgggtctgcacgacgtgtacgaaccgctcgacccgccttaccgccgcgaaatccccatctacaagccgagtgaccgcatcggattgccttatattcaggtagacccgaaaaagatcgtaggcgtagtggaaaccaactggccggacgaagcacgctcttttgccgctgctgatccgttgactgacaaaatcggtcagaacgttgccgacttcctcgctgccgacatgaagcgtggcatcattccgtctactttccttccgctgcaatcgggcgtaggaaatatcgctaacgccgtactcggtgcactgggacgtgacaagacgattcccgcattcgaaatgtacaccgaagttatccagaactccgtcatcggtctgatccgtgaaggacgcatcaaattcggtagtgcctgctcactgactgttaccaacgactgcctggaaggtatttacaacgatatggatttcttccgcgacaagctggttctccgcccgtcggaaatctcaaacaatccggaagtggttcgccgactgggcattatctctatcaatacagctatcgaagtggacttgtacggtaacgtaaactctactcatatcggtggaacgaagatgatgaacggtatcggtggttcgggagacttcacccgcaatgcttatatctctatcttcacttgtccgtctgttgccaaagaaggtaagatcagcgctatcgtcccgatggtttctcacctcgaccacagcgaacattccgtgaatatcattatcaccgagcaaggtgtagccgacctgcgtggcaagagcccgaaggaacgtgcagaagccatcatcgaaaactgtgcgcatcccgactacaaacagcttctctgggattatctcaaactggccggtggcaaagcacagactccacacgctatccaggccgcactcggtatgcacgccgaactggccaagagcggggatatgaagaatacgaattgggcggagtatgccagataaggcatgaaacgtctgtcgttcatactatcattcatcgtttgtatttgcgttgcaaatacaaacgatgttttttcgcaaaaagatatacgtaagctggcatccgcaacaacaaagtgctacttacatggaactgttgccaataaatggaacggataattaccttctgcaacagtcatcccgtttgcagcataacactcactatttgggtccggcagattttgttgctgttgcaagaactcaatagagataaaagcagggtccgctttctgcacagctttcctactctgcttaacatgttccttcggaagtcccgtactttgagactttaccattgaccgtgaagttaccaaaggctgagacggaactttcacctcccgatagacagtatccacccgttcacgtacgacaatcaccgtatctgctacagcgagtctctccaaaccagcttcctgcctgtctgaagtagtcgaaatcccatagcctattattccacccaacaaacacgcggccaccagccaccagggagaaattcccgagcgctttccacctttcacttcaaaagtttccctttcgggcagttcctgcttcgctttcatctttccgtccttctgtctctctctgagcttctgggcaaaagcagcataagaaacaggagggtgaacagacttttcctgttcatattgctctttagcagcatgaatcaactgttgcatttcctgagactcttccagtctttctaaatcatcacttttcatattcatctatttttgggggttataatctgataaagaacgctgcaatactttcaaagtataatataagcgagactttaccgtaccttccggacaacacaggatttgcgcaatctcctgtaccggaagctcttcttcatagcgcagcgtatatgctgcccgttgttcatctgtcaaccctgcaagtactttcttcaactgccggtcgaaaacctgacgatcatgtgccacctcaaactcaagcgaggaatagctatcttcttcattggtatatgattgttgtaaacgatactcgtctactatatcacgatggcggtactcatttttgcaaagattatacgccatcgcaaacgcccatgtagagaactgttttccatgctgataactgcctcttgcctcatagacgcgaagaaacaactcttgcagaaaatcatccgccaacgctccgtctgccgacagcatccgcataaagaaacctttaaaccggggagcataacggcagtaaagctcttcgaatgctttctcattgttcctgaatgcaaaacgttccattagctgttcgtctgtttcgtcgtggctgaaagaagtgaatagcatcatggctctaccatttctattaattgttgatattctttccggtgctcttccttaaatgaacgaactataacagaagttggtccttttttctccatatctcttacatgatcaaaaattctattaaacaacttcaaatgttcggcagtctttgcatctacccaagacttattgacaaaatacccatcatccatacgatccacaatatctaataataacttcttcagtctcaaatattgattcttgtctccactcgtatgatagaattgcaaaaggggaagaaaagaaagaacataggaagcttcaccacgtgaaatatccgtaataataggagactgtaaataatcaagcaaataaacctgttcataatttcttcttaaaatagccatattatcatatggttttaaggaatatctgaataccaatccttcagagtagaggaagtctttcatttccactacgtcttgtctacttgcagaatattgagaaatatatacaggacgctgctctttctccgcaaaataccatgcaccgggacattttaccttttcccggtcgggaaaggtatttacatctattccttttgtcttccaaaagtcgttctcttcctccggattcattaactcacttaaatctactacttccacatccttgaacaaccctgctccatactgaagcaatacgctgtaggcccattcgggaccggttcccgcaagaatagcattccttttcagccctacaaattcattataataataagtcaggatacttcgtgaatataatccgctgtcaaaccattcgcgtgctatttccctcaccttatctatctgtccataccgttgataataccacatatcatctctgtaatccctttcacaatcccgtctcaaataaacaatcttctccttgattgcctctcttttttccttgtcagaaatcataacctcatcatccaatactttataatacacccgtgtatcaggaatgtactttttcattttcttaagtaaacgaggctgttctttcttccatagcaatgtgtcttcatcccaaattcctttgcacgcaagatagtaattctcccacgctttttcatttctcacatctttatcgatttctaacttccatgcatctttttgaacttgaaaccattcttttccacaaggaataaagcctaccaaatcgggttccaaacgtagctcaagacgttcagttctcaaggtgtctattttccgggcaaacaaagcctgctcaaaacctatcaagaggaataatatatatataagtcttttcatagtctttatgagaagaacgattagaaattaatacttttaagataccgttcacgtacttcctcattgtaataatccgctttcttaatgatagattccaataaagcatgaagcttatcataatgagtcacatcacctgattccttataaaactggagaagggacttgaaagccggtacataatatatgctaagcatttttactcctttcaaatcaagacaaacattcgtcaacgtctcaggataaaaagactcgtataagtaatctagcagataagtattctcataattgcgacgcatgaccgccagattatcataaggtttggcagaatatctcattaacagaccttcagtatataaatgatctttcagcagatctttcacagcttcgttggttgagacagagatataaatgggacggttggtatatttggcaatatgctctatacgttttttgatttcatttgcaaacgttgccgtaggagttttacttttataaaattccggatcagtatctttgaactccggtatgcctaattcctccgtaagcctgttcatagaaaatgaaggaaggattaaacctgaaaggattactttcttatcattaaacaatccctttccatattgaagcagataacttccaaacagcgtccaattaacatcagtaaatatcaatgcgtccttttcggcagaagccaattcattataggtataatttaaagattgaacaggatatgcacctgattgataccaccgggcagaaatgtctttcagtctatccttattgctaaaagacaaccccatataaacaggataatgcatcacagcatcaggccacttatccataatttcatcaaaagtcatatcatttttcccaaaaggtaaaatcatattctgtatcaaggcataagtagcagtattgggtatctcttttttcatcttgtccatcatctcattgatttccttttctataccatcgccgggagtaagcgctttaagtgtttgaatcgttcgtgtataagacatccatgctttttcatctttagggttttcatagatcttctgtttccattcccgggcctgattctgaattacaggaatctgagatgcaatagagtccgggacccagcttgccttgttttgagaataaacctgtgctgtacaataacacaataagacaagtaacaagtatttgatagttttcattattcactcttttattaaattcaacattgcttaattagaaccgttctgacaaagcatacacgcgagcaaagcaaacgttcaaataaaagagtactttttttagcaaatatttatcatttctatcaacaaccttattcaatgctcatttcaaagtccgataatcacctcacaaaccttatcctgaaacgccctcgccctggctgccgaaagcacattctgattcataatggcaaaagccacttcatgtccattcttcatcttcagataaccggcaagggcattgatagctgtaaacgaaccggtctttgcatggacatttctgaatgcggaagtattcttcattctgtttttcagcgttccgtctattccggcaacaggaagcgacttatacaatttctgaaaaacatcggattgtgaataggcatatttcagaaaatcgaccaacagggcaggagacaggtaattataattagacaatccgcaaccatccgcgatcttatagtctttcggatcgtgcccgaggttacgaaccagtttcataatctcaacaatgccatcttccgccgtcacacgtttctttcctgtagcttgtgacgcaattcggcaaagcattgcttccgcattcaagttatcactttccttcatcagctgattcaagactttctgcaccggagtctcccagcgagccatctgctctgctccatcggacggtaattcagtaaaaccgtacgattcgggaaccacgattcctttcgcacggaggcgttccaaaaaagtatgcataaagaaactccctgaatcatagatgtttatcaaatcctttctaaacgtaggaacattgcctgtcacgatcagattattcccattggtcaaccaatctcttgataacgaatactttccggcagaaggagtacgtgtctttgtccggttcgtcagggtataataagaagacacaggcttacaggaaacgcttgccgtatctccttgtagagagccgggaaccaccgtcacttccacagcacccttacaaaacatcaacggagacatataaggctgataagcctccggagtatcatcccatgcccatccgtgcccccaataaagggaatctttcatcgaaacatcgccatacacctgtccgttgattaccgaaaaagggaaggtgattacttcttcgatcaatgaatccatcatcaaactgtcaaattccggatcgaatccaccgacaacatacaagttgccttgcaacgtatcatgctctatcaccccgtcgtgccagacttccgtacggaaaggattgtccgcatcgggacgggagagggccgtaatagctgtgagcagcttcatggtagaagccggacgggagagtttcgtatcacgataagtatataatgacttcttcgctgtcaggtcatacacggatatgccgacttcggatgcttcgggaagcattcttttgattagtgaatcaatctgagaaagatttgcctgtccccatacggatgcgggcaacaggacaactgataaaaccaaaaacaacaaatacttcttcatcaaccttctacattaactttcatgctacttcaacttcttccgtatcttgaatatcacggctatccgcttattatcaatcttataatgcctcccggaaaatctctcctaccgtaggatgagggaaaacaatcttcttccatgcggcggcagtcagtccaagctcaatggcagtaccggcaagagtgataatttccgaagcaggattgcccagcacgtgtgctccgattatccgttcctgttcatccagcagtactttgcagactccgttcacgccttcattctccgccacaaaacgaccggaataagccatcggaagtttcaccaccttataagtaattccttttgctgaggccgattcttccgtttctccgactcctgcaatctccggattcgtataaacaacgccggggatagcccggtaactcatagcatcttccttacccaaaatagaatgtacggcaacctcggcctcacggacagccgtatgagccagcaaagaaaagcctgtcagatcaccgcagacataaacgccggacagcgaagtctgcatcttctcattgaccttgatagcgccacgcccggttttatccagattcagattttcgagcccgaaacctttcgtcacaggtcggcgtccaacgctcatcaatagtttttctgctgtaacactgccctttccttctgcattctcataagaaacaaccgcaccctcttccgtctgtgataaggcgacaactttagtgctgagcaggaatttaatgccccgcttcgcatattcggcacgaagcaatgcagacagttccttatccattcctcccaaaatctcattcatcatctcaatcaccgtcacctgcacaccgagactattaaagaatgacgcaaactccataccgatcacgccaccgcctacaatggcaagggaggcaggcagctccttactgtccagcgcatcccgatgcgtccagtaattcaccgtttccacgccggtaataggagggatgaaggtttcggagcctgtacaaaggatcagattttccgcattgtatgtctctgcgccacagcgaaccgtatttttatctatgatctgcgcctctcccgtcaccatcgcgacattattggaggtcagttttgcctttacacccaataccagtttgcgtaccactttacttttacgggcaatgatcttcggcaagtcaaaagagacttcggagacattcaccgcatatttcgaggcatgacgtgcactgtcgtaagtctttgccgaatacaacagcgttttcgtcgggatgcatccttcattcaggcagacacctcccagattattcttctcgataaggagtacactcaaaccggctttgccggcagcttcggcggctgtatatcctgcgggaccgccaccgatgataatgacttggtatttcataggtataaaatttattgttccattctctttttaatcaactccacaaattcacgttccttgacaggcatcaccgaagcaaacttcccgtttccatactctatcaagacataattcgtcaccgaaaactttccgaatttcatggaatgatacttccggatagccgtgatttcggcaattggaattacttttttacgcataaaacgtccagtagatatctccagaagtccatcggtagatacggtataaaccgtatgaataatctgttcgatgactacaataagcaggagcattagtagcactgccggcaagatatatttacaccacaaagcaccgacggcatttacagtaagcaccaccagcagaaaatactggtaccaggcgatgcgggcatgaaaaattcgattcattttgtcagatttttgcgtgcaaggtagcaaatttatgaattagtgacaacgaaaagaacaacgaagtgacttattttgtagctttgcggtgagaaataaacaaaattatggtaagaaaattcgatttcctcgttatcggctccggaattgccggtatgagttttgcgctcaaagtagcgcacaaaggtaaagttgctcttatctgtaaaagcgggctggaagaagccaatacgtacttcgcacaaggaggagtggcgtccgtcaccaacctgctggtggataatttcgacaaacacattgaagacacgatgattgccggcgactggatcagtgaccgtagcgcagtagaaaaagtagtgcgcgaagcgcctgcgcaaattgaagaactgatcaaatggggcgtggacttcgacaaaaacgagaaaggcgaatttgacttgcaccgcgagggaggacactccgagttccgcattcttcaccataaagataatacgggagcagagattcaggacagcctgatcaaagccgtgcaaaggcatccgaacatcgaggtgatcgaaaaccagtttgccgttgaaatcctgacccagcatcatctgggagtaaccgttacccgccagacaccggacatcaaatgctacggtgcctacatcctcgacccgaaaaccggaaaagtagatacctacctcgccaaagtgactctcatggccaccggtggagtaggagctgtttataaaacgaccaccaatccgctagtcgctaccggagacggtatcgccatggtctatcgtgccaaaggtacagtgaaggatatggagttcgtgcaattccaccctaccgccctgtaccatccgggcgaccgcccttcgttcctgattacggaagcgatgcgtggctacggtggcgtactccgcacaatggacggcaaggagttcatgcagaaatacgatccccgtctttcactcgctccgcgcgatatcgtagcccgtgccatcgacaacgaaatgaaaaatcggggtgatgaccatgtttatcttgacgtcacccacaaagacccggaagagacaaagaagcacttccccaatatttacgagaaatgcctcagcctgggcatcgacatcaccaaagattacattccggtagctccggcagcccactatctttgcggcggtatccttgtagacctgaacggacagtcttctatcgaacgcctctacgcagtgggagagtgctcctgcaccggtcttcacggcggtaaccgcctggcttccaactcactgatcgaagctgtcgtatatgccgacgctgccgccaagcatagcctgagagttgtagaccagtatgcctacaacgaagctatccccgaatggaacgacgagggaacccgctcaccggaagagatggtactgatcacgcaaagcatgaaggaagtcaaccagattatgagtacttatgtaggtattgtccgcagtgaccttcgcctgaaacgtgcctgggaccgactggatatcatttacgaagaaactgaaagcctgttcaaacgcagcgtagcctccagagagatttgcgaattgcgtaatatggtcaacgtaggatatctgattatgcgtcaggcgatggaacgcaaagaaagccgcggattgcattatacgattgattatccacacgctaaaaaataatcatgaaaacattaactagactatttattcttttattcgttatggcaggtgtaagttcctgctatacagggatcccattgaagcaaggcaaatcggaaaacaaccgaacttacgaagtcagctatttgttcgagcatgacggagtcaaagtctatcgttttatggatatgggaaactatgtgtactttacaacaaaaggagatgtgaccagtatcaaaaatgactctacgaaagaaaggactgtaacgatctacagagacgataagttcagataaaaatatgtcttaataaataaaatggcgcttgcatatgattgcaagcgccatttttattatctaataaacacctcttattaatagttttctttcttcacctcgaaataagcctgcggatgcaaacatgccgggcaaacttcgggagcttccttaccgatttcgatataaccgcagttacggcattgccataccacttcgccttctttagcgaatacggtcatattttcgatgttgttcatgaaagccaagtatctttcttcgtggcctttctcggcgattgagatattgcggtacatagcggcaatcatcgggaaaccttcctgttctgccacatcagcgaaatgaggataatccagtgaccattcttcatgttcgccggcagcggcagcgcgaagattttcgagtgtattaccgatcacaccggccggatagctggcagtaatttctaccataccaccttccaggaacttgaacatacgtttagcgtgttccttttcctgatcagctgtttctgtgaagattgctgaaatttgttcgtaaccttctttctttgcaacacttgcaaaataagtgtaacgcattcttgcctgtgattctcctgcaaatgaagtcagcagattcttctctgtctgggttcctttaatgcttttagtcataattctaatctattttaaaattggttattaccaaacgtaacttgtcgtactatttataacgcaaatataagcgatttgttcgtaataagctcccttttcttgatgaataaaaactatcgattcatagataaaacctatcaacaatcaaatagcatgttgctaaacatacttatctcgattattttgcgtaattttgcaacctctactttgcaaaagagcaaattatatataataattcacagaaatgaagttatttgaatttaaacccaaattggtttcttgtttaaagaattattcgaaagaaacgtttatggcggacctgatggcaggcgtcattgtcggcatcgtagcacttccactggccatcgccttcggtattgcttcgggagtatcgcccgagaaaggtattatcactgctattattgccggattcatcatctctctgctgggaggaagcaaagtccagatcggcggaccgacaggagctttcattgtgatcatttacggcatcatccagcaatatggcgaagccggactgattgtggcgacgctcatggcaggtgttctccttatattattaggagtgttcaagctcggagccgttatcaagtttattccgtatcccattatcgtcggtttcactagcggtattgccgttaccatttttactacgcagattgccgatatcttcggcctgtctttcggaggtgaaaaagtaccgggggactttgtcgggaaatggatgatttatttccgtcatttcgataccgtgaattggtggaataccattgtaagtattgtcagcatcattatcattgcaatcactccccggttttctaaaaaaattcccggttcgctgattgctattattgtagtgacagtggccgtctatctgatgaagacttatggcggaatagattgcattccgaccatcggcgaccgtttcaccattaagtcagaattgccggatgccgttgtaccggctttggattgggaagctatcaaaaatctgtttccggtagctatcactattgcagtgctgggagctattgaatcactcttgtctgccaccgtagccgatggtgtgataggcgaccgtcatgattccaacacggaactaatcgcacagggtgcggcaaatatcgtagcgccattgttcggaggtatccccgctaccggagctattgcccgtacgatgacgaatatcaacaatggaggtaagacgccgattgcaggtattatccatgcgattgtccttcttctgattcttcttttcctgatgccgctggcacagtatattccgatggcttgccttgccggagtactggtcatcgtatcttataatatgagcggctggcgcgtcttcaaggctttactgaagaatccgaaatccgatgtcaccgtactgctgattactttcttcctcactgttatcttcgacttgacagttgccatcgaagtaggactgatcatcgcctgcgtactcttcatgaaacgtgtcatggaaactactgaaatctccgtcattacggatgagatcgacccgaataaagaatcggatatcgccgtcaacgaagaaaacatcatgatccctaaaggagtggaagtatatgagatcaacggcccttacttcttcggtatcgctacaaagttcgaagaaacgatggcgcagctgggagaccgtccgaatgtacgcatcatccgtatgcgtaaagttccgttcatcgactccacaggtattcataatctaactacactttgcgaaatgtcgcagaaagaaaagattaccgtcattctttccggagtcaatgagaaagtatataaggtactggagaaatccggattctatgaattgctgggaaaagaaaatatctgcccgaacttcaagatagcgctggatagagcggaagaagtcatgaaataaagagattccaacataaagaaagagccattttatctcctgcttttcgggattaaaatggctctttttattttaagagaggagagattaccgctccactaaacttttaaaaacaagccacgtttatacatcattctcaacaggaagaaaagaataagataattagtaaaagtaagccatacgggataataatctccgatgtattgtttcaacccgtaactgaccgaatcagcaatgcaacggaagttcaccacttcgcccaacagataagccgtgatggaattcataccatacactttcagccagttcaacccgcggctgtgtcctttatagtcaatccaataataaaataatgccatcaacagaaagcaataaccaccggatagtaatgtcatactacctgtccacaaacgcttaatgatgggcatctgcaaactccaaagcatcgccagccctactaaaagcacaccaatgaccgacagagtctgtaccacctttttacggttcgctttcccttctttcataatctttccggcaaaagctccgagcatgacagtcactccgaatgtcagactgctccatatccatgtgtaattgtaataaggtgaaaagctccacgttccgtcttcattccagaaaacaccatctctgaaacgacctaagacacatctgtccacctgttcggcaaagtttccagccggtgtgaagtcacccaaaaatgtcatgggaatccagtatatgaaaagcaacaataaagtgattcctatctgccacctgaatgaaaaatgtaactgaatgactgccgcaatgagatagccgacagcaatagactgcaaagtatttgaatagagataaatatgactgctgtccagtccaagcagatttccctgaacaatcattccgaaaataaacagcagaaacacccgcctcagaatcctccgatagacgagccagtaactgccggacataccgacgtactttgacagtgaaaacggcatcgaagcgcctgtcataaagaggaacaacggcatcacaagatcccaaaaacgaaatccctcccacacttcatgatcaaactgataaaggatatcattgagaaacggcaagttcaactgtcgtaccaacgccgcaaacaccggctgaaagaagacaagaagaaacaggtcaaagccacgaaggatatccaacgatgccaaacgggttgtgtttttctcagataatttattcatcgcatttataaatttaagttttcatcactcttccttacttcacgggataaatggtgaaagtaaatgtttgctttcccaacggaaccagatacggcggcaacacccccggtccgcatgtagcagtacctacacctgcctgcttagcatccaaatgtacggtaatcctgccattacgttccaagtcattgatatgaagtgccttctccaataataaatcaaagaaagggagagcactaaactggaatggagaatcagactctatccagcagccttttccgctgtcgtctgccagcttcacccaacgtacatcggtgcggtttcccgtcgactgggggataacataataatggaacatcttttcgggcgttgtagtatagatacctattttaccagactggtttctgtcaatgtatgtttcgtgttcaccacgtcccagataagtcacatttccataggtatcgttcatttcaaacgttaatcccagtcgtgctattgatttcacccatgtcgtgtccggctgaaaagtagtctgtactttcaaagatccattgtgattcagcgtatattccaatgtggcatctcctactttcttcccagtcacattcaatatatttacctgtgcggtagcggatgtcttactttctttcagagaaaccaccttttgggtcaatgtatgcaatccggcttttctccatagttttgcacccattctgtcccgattatcattatccgttgccggacggaacaggcttatagtgaccggactagccaacaactcttctccgtccagacaaagagacttcaaagcgcctgtgttttcatcgacttcaaatgtcgtttttccggcttcagaaggttttccattccatacttttccggatgcaggaagcacaaactggtcataagcaatttcccaagcggtgtccactaaaggagtggactttttacgtgtccagcccaaatcaagataagcttcacggatagtcttgggaagctgcaccgcccctaaagtaagctccaccgttgcatgcggctcacacgccacctccttgttgccttctgccaaaacagtaccatcatctcccgtcaccttccaatgcaggatatattcattcaaatcagagaagtcgaaccagttcttcacacgaaccgtcagattctttttatcaatcagtgtgctctttatattctgatagatcttctttacttccagcaaatgcggatgaggttcccggacagcatttaccaacccattgcaacagaagtttccaaagctgggcacatctttcggcccgtaatctcctccgtatgtccaataccatttaccatccttgtctacttcacggaacgactgatctacccagtcccagatacaacctccttgtgccatcggctcattttcgaagacctcccagtattctttcattccgccgcagctattgcccattgcatgcaaatactcgcaaagaatgaaaggacgataaatatccttgcgtgccacataatttctgatcacatccacactgcgatacatccggcaatagatatcggtattatagttttcttccgcacgttcgtattgtaccggacggtttttctccaccgatttcagccagtcatacgtacgttcgaaattgattccgttgccggcttcattaccgagcgaccagatgacaacagagggatgattcttcgaacgttcatacatacggcgtgtacggtctatatgggcaggaagccacgtactgtcctttgcaagagaggcaggaccataacccataccgtgcgattcaatattagcctcatcaatcacataaagtccgtaacggtcgcaaagctgataccagtagggatgtgccggataatgcgagttgcgtaccgtattgatgttatgctgtttcattaacctgatatcctgttccatcagttctttgcttactgtacgtccgagttgcgaatgttcgtgccggttaacacctttcaccaatacaggcacaccgtttatacagaaacgtccgttctttatctcagaagttctgaacccgacttttgttccggttatttccgtaacctttcctccggcatctttcaactccaacaacaaggtataaagttcgggatgctccgcattccatcttctcacatcaggaaggcgctgttcatcgaatacgatcagattgcccgatccatgtgattccagcttccggcttccttccagcactgtcttgtccgaagcatctttcaatgtataagcaatggaggacgttcccgaagccgttcctccgactgccacctccagttcgaagataccctctttgtaatgttctttttcgagaagggaagtcaccttgtaatcggcaatatattgttcgggagtgctgtaaagatacacatcccgttcaataccactcaatcgccacatatcctgacattccaaatatgctcccgaactccagcgatatacttcaagcgcaatcgtattttctccgtcggtgagcttgtccgtgatatcccattcggcagcagtcttggaaccttgattgtatccgagaaactcaccgtttacccatacataataaaacgatatcactccttcacagcagagtaccacacgacgtccttcccatccggcaggcactttaaaagtccgccgataagaaccgacctcgttctctttgtaaggtaccaaaggaggattctttttgaaattaaacatcttatcatcaaactcgtacgtctcattcacataaatagccgtaccatatccctgacgttcccagtttcccggcacctttatatctgcccatccacctgtatagtacgacggcttataaaaatcttttggacgagtgtccggattcttcacccaatggaacttccactgcccgttcagactcatataataaggtgactgctcgaatgtgcctttctccacctccgaagcatctgcataaggccatacataagtatgaggatcgagcttgttcaatcctacggcatactggctctgccattcaggctgttgctgttgtgccgtagtggaaatgatagcgggcgccgccagcatcattaagaaaaatggtttcaacaaattattcatttttatcattctatcatcacttcatcaaaatgcactcttgcctcctgcccgggacggacatggttatcaggacattttcctatcccttttgccgttacccttatatagcgggtttcaacgcctcccaaacttatcgatatatcctcaatataattaccttcacggaaaatctcttccggagtaaaggtccgttctcctgccttatcgaaagttttattatcaccggataccgcaatctctatcaagcgcggtttatgtacagccataccataactggttatgcaaccaatagtgaaggtattcaccttctccatcttctccatatctatagtaaaagagatagaatcattattcgtccaagaacaccattcaaagtccgaatacttcaggcttccacgtatcccgttagtcagaagtttctcattcggattacatcccgacacaggtttggcggttgccagattccaacgaacaggaagcgtcagtgtctttcccatttgtctgcctttcacaaaagtagcacttttaagattcaatgtctcttttacggccaatttttctttataaagaggtgaagtagctataggttcactgccatctgtcgtataatgtatttctgcatccggccggatacattccagtttcactttcagtgctccatcttcgggagtcaccgtgtggtgaatattatacatcgaacgggcatagacaattccttttgccgtcagatgttcattataaatatccattgctttcagaaatgaagtccaatcctttttctccggctgtgtccatgctatctccgccaatgcagccagacggggaaatactaaataatccacgtcttcaggtttattgcagaactctgtccacatggatgcctgcacgcccatgagtaaagaagcgtactccggcttccagtctgcctgcaccggttcataatcataaatatccttcaacgtattattaccaaagtaggtttgaggttcaaaccattgcggtccctgataacgaatcagatacatgatacgtgcgggtgtcatgatgaacggatgcccttgctccgctgctttcagagcagccgttcccagtcctctccatccctggatgataacgccttcgggcaggaaactactgttggtcagttcgtcccagccaatcacttttcgtcctttgctgcacacgtagtcactcatccgtttcataaagtaaccttgcaagtcttcttcattgtccagatgttcatttttcatccgtgcctgacaaagcgggcacttttcccaatatcctttttgcgcttcatcacctcccagatggatatagcgggaaggaaacaaagccatcacttcatccagaacattctgcaaaaaagtaaaggcactatcttttcccgcacagtagatcactcctgaattgcctccacccaaacccgggatcaccccgatataactctttactatcggacaggtcaattccggataagcagccaatgcagcattactatgggcaggcatatcaatctcgggaataatttctatctgccgttcggcagcgtaagccaccatctcctttacatcctcctgtgtatagaatcctccgataggcgtaggttctcccggttccggattgcgccggaaatagaaaggaacatccatacggttgacccgccaggctcctgtttccgtcagacggggatatttcttgatttccagcctccagccgttgtcatccgtcagatgaaaatggagagtattgattttgagcatcgccatacaatcgatgatacgcaaaacgttctctttaggaataaagaatcgggcgacatccaacatcagtgcccgataaccaaagcgtggttcatcctgaatagtcactgtgggaatattccagtcaaggcactttgcccgttgattgccttcgatagcaggtggcagcagtaaacggatcgtctgcaatgcgtagaaaaatcctttcgtatcggaagctttcaccaaaatctgctgcggggtaacttccagcaggtatgcttcactttttagagaagagtcagtcgtaaaacgaacatgactcttctcactgctacccattgtcaactgaggaattatccctgagctttttttaaataagtctataaagttacgggcgataaccgcctgttcatggttttctacggaaaagactgtcttgtcggaaaaggtaaagttacccttgcccggtactacacgtaccggacaaggaactattgaaataggggatggtgttaagttatcagcgcttgcccccgctataggtgccagtagcatgagaatgattaagatgtatttcgtcatgatagtcagttttattattattccttgtctctctcaggggagaaacggaccggatcattatactgttcctgcagtttttccatttctactttcagttcttcggcgatggattcatattcgggttgaccgtaaaggttgtgcatctccgtaggatcagcctgcaggtcgtaaagttcccaccagttgatgttattataaaaatgaatcagtttatagcgttcggtacgtatgccgtaatggcgtttcaccatgtgttcggcaggatattcatagaaatgataatataaggctgtccgccagtcctgaggatgttcgcctttcagcaacggaacaagtgacactccgtggatgtcttcgggcacaggagctccggcaagttcgaggaaggtaggggcatagtcgatgttctgcaccatttccgtgatctttcccctgcggtcaaagcctttcggcaggcgcatgataagaggagtacgcatggactcttcgtacatgaaacgtttgtcaaaccaaccatgctcacccatgtagaagccttgatcggaagtataaactaccagtgtattgtccagtaatcccttctttttcagatagtcgaatactctaccgacattgtcatccaatgatttcaccgtcttcatatagtcgcgcatataacgctggaatttccagttggcaagttctttcccctgcaggttctgccggtagaaatcggctatgatcggatcataaaacttatcccatgcggcacgctgtgctttgtccatccgtccgatatacttttcatacaaggctttcaggcgggagtctttatcaagacgcagcattttaagatcgtagatcatatccatatctttggcaatgctcatttcctgtgaggcggcagccggacgtccctcataatcgtcgaagaaattatccggtaacgggaaggtcttatcttcatacaaagccagattacacgtatctgccaaccagttgcgatgaatcgctttgtgatgaatcaacaggcaaaaaggtttatcaagatcacgtttgtgttccatccagtcaatggcatcatcggtaatcagatttgtgatatatccgtgcttccggatggtgtcgttgttctgtgtaatgaaatccggattgtagtaatcgccctgaccgggaactatttcccagtagttaaatccggaaggaaggctttcaagatgccatttgcctaccaatgcggtctgatatccggctttttgcaacaatttggggaatgtctgttgagcactatcgaatacacaagtggtgttatcatagaatttgttggcacaactgtgcttgcccgttatcatgcaggcacggctgggtccgctcagagaattagccacaaagctgttggtaaagagtactccttcttccgctatgcggtcaagattgggagtttccatatatcgggtatcatagcaactcatcatttgtgctgtatgatcatcggtcatgatatagacgatgttcagtggcttctgtgcagcctctttttttaccgaagtacaactacaagctgcagcagccaatccggtgacaggaattatataagtatacttcattttatttattcattgatttaaaagaaatcatccggagaatacttgcgggattccccggatgattgataatacggattattgattaatagaacttagtaccatttttagctttacccagttcataatctgctaccgtagctttattgatgtatgtacgaacccaatcaatctccagacgagggatagcgtcgttttccttatctcgctcataattattgtaacttgcgaatccggaatcccagccggcatcaggagaccatactccgcctgtttctgttccaccgccaagtccccatttattaggtgcacccatagtgaggatgaacttaagtcccttctcattctttgcattcgtaaaggtccactcctcttcggtacattcgctcttcttcaaggttacggtttcttctccgttgatacctattgcaacttccgtatccgaacgccactctacccaataaatattccattcagtcatattgattgtattattagcagttttggttttattatcagttgtagtaggaccggtatggaatgtctgatgtgctctgtctccggttacaggaccgacaggattttcaagaatatctatttccgaataagatttctgaccggcagattcatcagaaaccagccagatacccatattaaagccattcttctgcccacgaagacgggcacggatttccattctgcaaccttctgatatcaactgactgttggacttccacggagaacccgttccacaaccatagaaagctgctgtaccataatctctttgccctgatgcaggagccgtagcatttgacggtactttcatttctatcattcgcagatagccgtcgtccgtaatctttgagaactgttcgtttatacaagcagcatggttctgaacgatcacggtattacgtgccgccaggaacagaggtactttattaccaaaagagttgccattgttccacatgtcgcccgaatttcccacactatggaattcccacgcattatagaatttccagcctgctgcagccaagtccgcattaggatgcgcatccaactccttcattaaaacagcatcgccatattgctcaaccacagccgtctgccttccactggaagcaaacgggatccccggatgatcatatacccagcgttcgtcaagaagtttactaccctttcctgcttcgaggtctttcatgatgatttccattttatcattatccagcggatacataacagaaatagttgtaaaattcagtaccaacgtttcgtgctgtgtaggactgaggttatgtttcgtcttcacttttgcctctgccaaagtttcacctgcgtttactgtcaatgtaacaggaggcaacgtttcatagagactcttttgatcatcaggaatagtgatgttaatatccatatcgtctttcaccggaacaggagtctgcacctgaatagtaaactcatcaccttcattaattatattatccgaattgttcttcagtgacactactgtataatagtggtcggagaccaccaccgtttgagtaggattagtcatggcatagccacgcacgaaggcagtcacgttcacagttaatttctgtttcggttcaagaccactttccacaatcggcaatttaatatcgaagctactcacccctttggggaccgtaaccatcgaaggaaaatctttaaatgcgattttcgatacatccatttccccgtctttagcggtcagatacacatcaaaatcttcattagtcgtcaattgcggattcttttcatcattaactttgacggtaagagtcagttcttctcccatcacaaagctttttccacttgcttctataatcaacggtacagtctccggcaatggttctaccgcatcgtcatcacaacctgcaaatcctgttgcaagcaggcaaacgggtaaaaatgtatataatattctttttatcataatagtatagtttataaaatgaggtatttattcacttacattctcccaacccggattttgacgtaactggcgatttaattgtagttcatcctgtggaatcggcaataaatagtcccgtttcagatcgaaaaggtatccattaggcaagtattgctgcaatgggtccatccaaccctcattatccttcaatacgagctttagtgactcttgtccctcgggtgaaaaactccggtacagaatcccctctttacccagataggcacctctgccgcggccatctattcctttcagagttccggcacctgcccaacgcatcaaatcatccagacggaacccttgaagagccagttccgaacgccgctcacggcgaatctcctgaataacaggactaattcccgtaaatgggaaattgggatcggttgtcggagtaatatatttcacacctgctctttcacgcaacgcttttatcgtttttgcggctacattatcatcatatttattgagttctgctgctgcttccgcatagcagagcaatccttccgcatagcggaacataataatggctgtttcactgttaccgtctacataagttgtatcgatgcccatccgaatatgaaatcctgtaacgtttttactgttcccgttgccattcaaactcggagatacgatatcatcattcttcagttttatttcttccttagtacctgtaggatcataagctctgacgttcattggcttagaagcagtagctcctgcattcgagcgatatttacagcctgtatgcatcactgtagcaagaagccgcgcatcccgatctttaaacatttgattgaaatccttaaatttcagttcagcaggatcaataaaagtaccatcggtatacaaataattatcaaccaaagattttgataatcctgccgggccgtcggtattgaccacaccactggaaagtaggcctcccaaagcattgaagataccatcattcaaagagtactttttccagaaaacagcctcttgaatcccagagagatctttcttattaaacaaatgtgcaaaagcgtcttccgcactgatagcttccttatcagaatcctttgtattcaaggtcagaccggcagggaaaagttgctgatcaccccagttcaatacttcctgataaaattctgcggaattatcctctttggcgaactctgttcctttgtgatatttttcccatgaaccttcgtaaagcgctacccgcatagcgagaataatagccgcctccttgttaatacgcaatccttgatatttactacgggaaaacagacttgcccgagtttcgggaagctcgcctatagcagccttcagatcgctcagaatgaaccgtgccacatccgaacgcttagtagccggaatttgtaaaccggcaactgtggcattcccatcccaaaaatcatccataataggtatatccccaaagcgggttagcaaataaaagtgccagtaagcccgtaagaaataagcttctcctcgcaaagattgtatctcggctgtttcctctatttcaggaacacaataatagtagaagaaatagttgacatcacgcaggttctcataccccttcttccagtcggacgagccgctgaacaaattattttcaccattcaggcgcatatcatacttttccgccagaatattgtcgctgttcacctcttctcccctgacacccattccatactgtgccggagcgggcaatgccgggtataaagcattgatatagttctctacctgttcccgtcctgacaggaaggtagtgttatctggctgcgtcaatggtttccggtccagaaagtcggaacaagcagacagcatcagtcccataaaagcagttagaataattatcttctttttcataatagttcctctctaattaaaatgtgacatcaattccaaatacaaagttccggttcataggatatacacgtccgttaccattggcattcaatggtgaagtaagtgccggggcagtgtcattactgccgcctacccatccgttcacctgattcagtgtttccggatcaaactgtttcggcaatttagaaacagtaaacaggttatcacaagtgacgtatactctcaaattactcagtccgatatgttgcaccagctgaggcttgaacgaataagacaccgtcagattctttaggcgcatataagctgcattcagcaagtaacgggtggtattgtagcctgtattggctgccagagtctgtttatcatccgtcagacgtggtaaatatccttcaggattctgagcattgaaatggtccagatgttccttgaaatagctatttccaccaaagaaataagccgcaccggagatggggaattgccgtttggccaccccttggaaaagagcagatacttcaaatcctttatagcctgcattcaggttgaagccaaaagaatatttgggagtagcgttaccgatcactttcaggtcaccgtgatctgccagtgtacccttgcccgaatcgacttttccgtcgtgatttgaatctatatatttcacatcgcctcgttgccacttatcacccggcttaaagaaactaaggtctaccgttttgaggtattcatccacttcacggttggttcggaagaggtcatcggcctggaatccccagatttcgccgatatccattccctcatagtaacctttgttacgtgccagaccggtatgattattgtaaagcaggccttcgggattattatatttcgtaactacagccttataatcggaaatattgaacccgataccgtagctaaagccacatttcagtctatcctgccagttgaccgataattcccagccacgattgcgcaaagttgcattatttattttcgaacggtcttcagtattaataccgctgatagaaggtattgcctcagccggaccgatcatatcgcgggttgtacgctgataaatatcggcagttacagaaagtcggtttctgaacagcatcaggtcaataccaagattggcattatccactttctcccatgtgatataaggactgatcattttaggtgttctggcaagtactcctttggacggagtatcacttactcccggcagtaaccaagagtcggtagaatcaggaaccagattcataaatccaagatagtcatacaatccggcaccattctgattacccagacgtccataagacacacgtagcttcaactgggagaacggaaggttccatcccttgaaataatcggtacgtgccatatcataaccggcggagaaagaagggaagaatccccaatgatgtcccggagcaaaacgggaagaaccgtcatagcgtccgctaaattccaggaaatatacctcctgatagttccagttcaacttggcatacatacccatcgtggcccagtgagtacggtcttcattgccggaaaggttaccattggcattggcaaacgagaaaatgtcactggtcagcagaccgtctttataggtataaccgtcagagttttcctgcagttccatctgaaaacctgccattgccctaaaggtatggtcgccccagccaaaaatataagaagagagtatattcggagaaagataatagtcgaaggcattcccacgggtgtaagatccccagcgggaatttttccagttcatacccggatatacgtatccctgcttggtcgacttatctatcgataactctccgtcgggtttttcgtaagtaggataaccacgtttgaagctattatcttccacatcgaaacggactttcatttctcctacaatatcccatccttggagcggagtgatggtagcggagaaagacatagcatcggaaatacggttttctacataatgtgattctttcagataacggaactctgaagcatcattatatttcgactcaatgggataatgagtcggagcattcggtatagtctgaccaatggttccataaaagatggtttggttcgccatcggacgcttcagaatattcaatgtcaggttgttgttgaagttgaacttcaaccatttattagcattaatctgaaatttcgtattcacattgtatttactcaggttatcatctaccttatccatcagaccttcctgataaatatagcctaaacctacataatagctgaccttatcagaaccgccggatatactcagattgtgggaatgacgaatggaagcatccttaaaataataatcaaaccagtcggtattggcatataccgcatcctttgatgatgcccagttggtcttattctgattaggttcgatacccggaaattccgtggaataaggattcttcataaacccttccatcttttctatgagtgcgtcagaaatctcgtgtttcttgccatcattatcattgcgttcgtttatataatgagcaaactccagagagttcatcattttgggcatattgataggtgaactgaagccgactgttccattgtaagagacacgtgttttatcctttccaccgcttttggtagtaacaataatcacaccataggcagcacgggcaccataaacagcagctgcagaagcatctttcaatatactgatcgtttcaatatcgttaggattcacattctgaaggctctgctcaactccgtcgatcagcacataaggttctcctttattaatagaacccgtaccacgaatattgaacttgatttcagcacccatttcaccgccgacaccatcagcgactgcatctgttgaaaaattcaagcctgcgacattaccctgaagggcactggtcaagtccgttaccggacgactggcgattgcttccgaacttaccgtagcaacggcagccgtaatagtgctgcgcttctgcttgtccatacctacaaccactacctcatcgagcacctttgcatcttctcttaatacgaaacggttaccttcaagtttcttcactttcacttcaagaggagaataacctacataagaaatggacaatgtcgtgccgactttacctttcagagagaaatttccgtcaaaatcggtcaaagtcccttctttggcccctttcaccatgattgtggctccgataatagattcaccactatcatccaccacttgtcctttaatcatttgttgctgtgcaaacgctcctaaagggaataataggaggagcatcagaagactaacaaaacaactttgttttttcatctgtttcctttttttcataatactacatttaataataaagattcatactttcactagctaacaataagtttcaatcttcgacaaaaatacaaccacagcataaaaggaaacattcaaaaatcatcaattaaaattcaataatgatcaaaagaaccctgtgcaatccgctaaatgatcattattgatagagaagtgatcaaaaacaaatgccaatagatggtgattcacttcccgtgcagtgacaaacaaactgttttttaggcaaaaacccgcattttttagaaacaggacgttttgcagccaatcaattgcaggcataagacagaacgttatcaatcattatcaagttaatagacagcacaatacaggttactatattctcaaagtattctcatcgtgatgagaaaaaattctcaccacagtgagaaaaaatactcatgcctatgagaatattttctcattgcagtgagaattttttctcatttcggtgagaatcgaagtgtctgtactaacctgctaatggtcaactactcatttactacacaattttattcatttccgagtcaagaaggagctaacaaggcatttttatcgatttttgaaagcctattgaacaaaattgaaaaagagtcagaacatggataaggaagaaaaggagtacttttgcacgtactcctttaaattaatttattatgaagaaactttattctttttttatctgcacacttttctccctttccgcatcatcaataggaactgttgattataccaaaggactctctgtctggttcgatactcccaacaatctcgacgggcaagctatctggctacgtgcttccggttcaggagccaatcctgacaaaacgtgggaaagtcgttcacttcctatcggaaacggtagtctgggagcgaacatcttagggtcggtggctgccgaacgcatcactctcaatgagaaaactctctggaaaggaggaccgaatacttcgaaaggagcggaatattactgggacgtaaacaaacaatcggcaggagtattaaaagaaatccgccaggcatttctggatgaagacaaagaaaaagccgcccaactcacccggaacaacttcaatggtttagcagcttacgaagagaaagatgaaactccattccgtttcggttcgttcaccacgatgggagaactttatgtggaaaccggactcaatgaactcagaatgagtaactatcgccgtatcttgtcattagattctgccatggttgtggtgcagttcgataaagatggagtgcaatatcaacggaaatatttcatttcctatccggacagtgctatggtaatgaagttcaccgccaaccaatccggaaaacagaaccttatattgagctattgccccaacagcgaagcaaaaagtaacctcagggcagacggaaaagacggactggtatataccggagtactcgataacaacggtatgaagtttgccttccgaatcaaagctatccacaaaggaggaactctggaagctgaaaacgaccgccttatcgtaaaaggcgctgacgaagtggtatttctgctcacagcggacaccgattataaaatgaacttcaatcccgatttcaaagacccgaaaacgtatgtaggcaacgatccggaacaaaccacccgaatcatgatggaccaagccgtacaaaaaggatatgatgaactgtaccgtaatcatgaagccgactatacggcgctattcaaccgggtacggctgcaactcaatccggatataagcactcccaacctccccacctaccaacgtctggctaattataaaaaaggaaccccggattatcaactggaacagttgtactatcaattcgggcgttacctgctgatagccagttcgcgccccggcaatatgcccgccaatctgcaaggtatgtggcacaacaatctggacggtccctggagagtggattatcacaataacattaatatccagatgaactactggcctgcctgctccgccaacctttcggaatgcacatggcctttgatagactttatacgcagcctggtgaaacccggtgaacaaacggcacaagcctacttcaacgcacgcggatggacggcatccatctctgccaatatcttcggatttacagcgcctttatccagcaatatgatgtcatggaacctgaatcccaccgcaggcccgtggcttgccacacacatctgggaatattatgactatacccgcgataagaaattcctgaaagagatcgggtatgaccttatcaaaagcagtgcacaatttgcagtggaccatttatggcataaacccgacggcacttataccgctgctccttccacctctcccgaacacggaccgatagacgagggagtaacctttgcacatgccgtagtgcgtgaaatactattggacgctatccaagccagcaaagaactggggatcgactccaaagaacgcaaacaatgggaaaaggtactggataaattagttccctaccgcatcggacgttacgggcagttaatggaatggtcgaccgacatagacgaccctgaagacgaacaccgccatgtgaaccatctcttcggattgcacccgggacataccatttcgcccatcacgactcccaaacttgcagaagccgcaaaagtggtattggaacaccgcggagacggagccaccggatggagcatgggatggaaacttaaccagtgggcacgccttcaggacggaaaccatgcttataagttatacggcaatctgttgaaaaacggaacactggacaatttatgggatacccacgcgcctttccagattgacggaaactttggaggtacggcaggaataaccgaaatgctgttgcaaagccacatgggatttatccaattgttgccagccttgccggatgcctggaagaacggttcgataaccggcatctgtgccaaaggcaatttcgaaatttccatttcatggaaagaagggcaactggacaaagcaaccattctttccgggtcaggaactccctgcaatgtaagatacggagataaaactctctcattcagcaccgtgaaagggaagaaatatgagatcactttagtaggaagtctgttaaaactgctgtaaacggcacctatttcatcatatattcagcaaaaaccggctgaatatatgatgaaagtattatctttggtaaaccaaaccaaggatcaatgtgccaatctcagacgatccgctaacctacttttacatgaaaacaagattgcttactttaccagggattatagctattatactattgataactaccctccctctccgcgcagaacattactactataagcaaatctccctcaaagaaggactgccgtccaatgtacgctgcatcctcagagacgaacagggtttcatctggataggcaccaaagcaggactgggaaagttcgacggacatcagctgaagagatacaaacaccaggcgaatgatccgcactcgcttcttcacaacctgatctaccaaatagcggaagacaaacaacataacatctggatactgaccgaaaaaggaattgcacgctatcagcaacagagcaacaacttcactttccctacagacgaagaagggaattacattactgcctattccttctgcctcgttccggatggaatcctgttcggtggcaaagacagaatctataagtacagctataaggactcttcgctgagactccttcaatatttcaatgccaactcttttaaaatcaccgctctcagtgtatgggactcaaagacgctgctctgttgcagccgatggaccggcttatatctcgtggacctgcaaaccggagagcacagacgcccgccctttgactgcggaccggaaatcacaagtatgataaccgattctaaaaatagaatctggattgccccctacagcggtggactgcgctgctactcacgcgacggcaaactatcggcttcgtacactacccataactcctcactcagcaacgacatcgtattgagcctcgccgaaagagaagaacaactgtggataggaacagacgggggaggcatcaatatcctccatcccgaaaccggagaaatctcccaactggagtatattccgggccgtgagaactattctctgcctgccaactccattctctgccttcacaacgattacaacaacaatgtatgggcaggaagcacctgcaacggattgatcagcatccgggaagtatcaatgaaaacctatacggacgtagtgccgggcaacgaccgcggattgagcaacggcactgtacggagcctttaccggcaatcgccggatagcatctggattggcaccgatgggggaggcatcaaccttttcagcccgcacaccgaaaagtttacccattattcgtctacttggggagataaggtggcattcatcagtggctttacacccggaaaactactgatctcgcttttctccaaaggagtctttgtcttcaaccccgccacaggagagaagcaacctttcaccatcatcgacaaagaaacgactacacggctctgcaaccgtggaaagtccgtcaacttatatcaaaatacgcccaacaccgtgttattcctgggagaccacatctaccagtatcacctcaaagagaagaaattcagcaccatcaccgaagaggaagggaaagatattgtgggtacccttgtcccgttcgatcatcaagagaacctgacctatatcaatgatatcaaacatatctatgaactggacgaccagacctcccggctgaaaaccgtttttgaatgctacacggatacagtgatcagttccgtatcccatgatgaacagggacatttctggattggaagcaatttcggacttatccactacgaccctgtcttaaaaagccggactcttgtccctaccaatctgttcaccgaaattaatatggtactgtgcgaccagaaaggcaaagtatggataggcgttgacaatatgcttttcgcctacttcatcaaagaacagaagtttgtacttttcggagaatcgaacggagccatacaaaacgaatatctccctaatgcacggttggtgaacgaacaaggggatgcctacataggcggtgtgaagggtatgctgcgcatcgacggacaacttcttctgaacacatcggaaatgccggaacttcaattgctggatattaccatcaatggcgaatcggcgaatcatgaatggtacaaccatccggcaaaaatctcggtaccctggaacagcaatatatccatccgcatcatgtcgagagaagaagacatcttccggcaaaagatttacaggtatcagatagaaggattgaacaacgaatataccgaatcatacaatccggaactggtgatccgatcactgcttccgggaagttatagaatcatggcttcgtgcactgcaaaagacggtagctggattcccgaccaacaagtactggaactaaccgtacttccgccctggtaccggacatggtggtttagcctgatctgtgccgtactcgtttctatagcaatcatcgaaactttccgaagaacggtgaagcgcaacgaagagaaattgaaatgggcaatgaaggaacacgagaaacaaacgtacgaagaaaaagtacgtttccttatcaatatcagccatgaactccgcactccgttgacacttattcatgcgccgctcaaccggatactgaaatctttgtcttccgaagatccccaatatctgccgctaaaagctatttatcgtcaggcccaacgaatgaagaacctgataaacatggtgctcgacgtacgcaaaatggaggtcggtgagagcaaactgcttattcaaccgcatccccttaaccactggattgagcacgtatcacaagatttcatcagtgaaggagaagcaaagaacgtacgcatccgttaccagctcgatccgcagattgaaacagtaagtttcgataaggacaaatgcgaaatcatcttaagcaatctgctgatcaatgcgctcaaacatagtcctcaggatacggaaataaccattgtctcggaattgcttcccgaaacaggaagagtacgtatctccatcatcgatcagggatgcggattgaaacaggtagatacacataaactctttacccgcttctatcaggggacaggagaacaaagtggaaccggaatcggattgtcttactcaaaaattctggtcgaacagcatggcggctctatcggtgcacaagataaccccgaatcgggggctatcttctttttcgagctaccgttgaagcaagaatcagaagagattatctgccagccgaaagcgtatctgaacgaactgatgcttagtgataatctgaagcaggcaaccgataaagaaactttcgatacaactccatacaccatcctggtggtggatgacaatccggatatgacagactttctaaaaaagacactggaagaatctttcaaacgggtaatcattgccgctgatggggtggaggctctccaacttatcaaaagtcacattccggatatcattgtcagcgatgtgatgatgccgcggatgaacggatacgagctgtgcataaacatcaaagaagatattacgatcagccatattcccattatcttgctcacggcacgagatgataaacaaagtctcatcagcggttataagaatggagcagatgcctacctgacaaaaccttttgaagtagaaatgctgatggagataatcagtaaccgtctgaaaaacagggaatacattaagaaaaggtatttgcatacgggcataatacctgtcccgaaagagaccactttcagtcaggtagacgagagcttcttacttaaagtgaacaaaacaatccaggagaatctgagtaataccaatctggacattcagttcatttgcaaggaaataggtttaagccgtacttcgctttacactaaactgaaagcacttaccgggataggagcaaatgattacatcaataaattccgaatagaaaaagcacttacgttaattgccaataccgaaatgacatttacggaaatttcagaagaggtcggatttacatctcccagttatttcagcactgctttcaagcagtacacaggggagacaccgactcaatacaaagaaaaaacaagtaaaatataatatcatcataatctgaagacaatatttatcaaaaaacaaaaggagaaagcgaagttagagtaaatcgaccaaaatctgtcagagaatgactaaatagtattattccatattcaaattaggttgtaattttgccctatacctaagtgaagtatttgtcaaatcctaattaataaaacaatagtatgaaaaaacattttctgatttttacaatctcacttctatttttctcgcttgcacaaggcaaagtgaagctccctgccatgatgggagatcatatggtacttcaacaaaacagttccgttaagctgtggggatgggcagacggcaaaaaggtgactgtcaccacctcttggaataaccgtacttataaggtatcgacagacgatgagggagcctggctggtcaaagtggatactcctgccgggagttttactccttattctattaccatcagtgacgggatccgggtcacgctatcggatatattaataggagaggtatggatatgctccggtcagtctaacatggaaatgaccatgaaaggaaacatgggacagcccattgaccattcgctggaaactcttctgaacgcaggcaactatcgcgaccgtatccgttttatcactgtcccccgaaccaaaggagtgaaagaacggacagactttgaaggagcgaaatgggaagtttcttcgcccgaaaccactatggattgcagtgccgcaggttacttctttgcccgacaactgacggaaacgcttcatctccccgtaggactggtcatcaacagctggggaggttcacgaatcgaggcatggatgacagaagaaacgctcgcctccgtgaaaggcgcaaatatagaagccgccaaaaatccaaagttagatacgaacagccggctgcaatgtctgtataatatcatgttactgcctgtgaaaaactatacggcacgcggatttctatggtatcagggagagtcgaatctattcaactatcagatctatgctccgatgatgactgcgatggtgcagctctggagaaatgtatgggaaacaccggatatgcctttttattatgtccagattgctccgcacaaatacggaaacagccggaatataaattccgccttattgcaggaagcacaaatgaaagcattacagacaatccccaactccggaatgattcctacgatagatgtcggcgacgagttctgcattcatccccctcagaaaaatgtagtaggactccggctggccaatctcgcactgactaaaacatacggtctccataaattcccatctaccggaccgatgatgacaaaggtggaatattcaaagaacaaagcgatcgtcacactcgacaatgccccttccggactggcaccgggcaactgtgaattggaaggtttcgaaatagcaggagccgacaagaagttctatccggcaaaagcacggattgcaggtcgcacaagaaatgtggaagtatggagcgatcaggtcgcccaaccggtagccgtacggtatgctttccgtaattatgtaggaaacatcactttacgcaatacattagggattgctgctttcccgttccggacagatacatgggatgatgtaaagtaagagctgattagcctctgtgcagggtatatatgccctgtgtacaggagctatatatccaacgcgcaggagctatatatccaatatgttgggcatatagctcctgtatattgaataatagtcctttttcaatacactatattttattcattcctgcacagttttgaactaatagaataaaaattactatctaatagaatgattctcacttcataaaaagagtattcaaatgaagaaatccctaaccagattaaatatggaggtagcagactgaaggactgcttgtgaaagtaatccttcccgtctgtctcccaaagaggatgccaatagttccccacaggcatcctcttttattatatatcaatgatttacacgaaacacattctagaatgaatgcatcctcagttgcttatcaaccaatattccgtctttcagattcagatcaaacttcactttacgtttcgctttcaatttcagaataaagagttcttccgaaccttccaaagcctcctgttttcccatattgacgaaagtaggatagagagatttcacaccattcgtatgcaggcggtcataagtcagattttccattgctttcatattcagcggttccacacctacaaattcatagtcgctctgatcataaggcaaagcaaagctaagtgcattaaccgaacgcagatcattacctttcacacggatttcaacgatttcgtccttctggtactgcttcttcggagtgctgatagacagagagccggatactttctccgtagctttcctgtcgacaccgccgtcgagctgagtggctacgacagaaatatcataagcatctatcaagtcattcatgttgatatcgcctttgctgatataaccttcaaagtctgaatcaccacgacgcaatccggtatagttcatataagaagtcaggtcattgcggtcgatcttgccatcattgttgatgtcgccttgcaggtaacttgccgttcccggtactttgaatacgtagatttcacgacctgaaccatagtttcctacacctgccgtaacgttcagtttgatgtaacgtgcatttggacgctctgtgaaagtgaatacttttacatcaccgtcccgctgccattcgaatgctccggcttccgtccagttttctttgtccatactgtaggatactgttcctttcagcagtgtaccgttgccggcatccgcacggggtagataatggaacttatccagttggttaactgttttgaggtcgataatcaaatctaatggtatggagttaacgttatacttcgtgtgccatgtatctcccgattcggagaagttgaacaatcggtctacaccgaatcctccctgcgatgcggcagtcgattcgccttcaatgccacgaatagcaaattccagcggattagtcttcgttttcacctgaatctctgcccattcggacacaccgtctttgttgacagcacgcactttgaatgcgtaaggagtatccgctttcagatcttcaaacagtaagtgagtatcccggatagtcgtataaagcattccgtcaaattcaatctcatagtaatcggcattgggtactttgtcccaagtcggttgcagggtatatgcttctctgttctgctcgcttacctgagcgttttgcggtgcagacagggttccgttgcttaccaagttccggtcggccggctcaaagcggaaaccttccacgtccagctcgatacgattggcggtgatgtcggtgctgcccagtttgatgtgcaacagcggattctttgtgataaccactttctcaaattcacttcctttggttgcaaacttattcagattgggggtttcttcgtaccagaatacgttttctccattcagaagttccgctgccgtgcttacttccgtcagttttactttcttgttgttgattcttgcagtcagtttcttcggtttctccgtgacgttgatgcgcagttccgtctttttatcttttacaaaaccgtcgaaacttccggctgtgggatgaatggtgatagtcacacggttctttgcgtctacgttcgattcgatcagggtagataccgatttctcctgacggtaggcttccgtcacaccgtcatcgtcatattctacggttgcagtatggcggttcggataaaattcatagatgcgaagtgaggggtctatttcgctgacattattgttaggttgtgtcatcggaataatagcgccgttctttacgaatacgggtaacttccagaccggagtatcgaagttgctgagaatacggttgccttcgtatttctctccgctgaaataatctatccaagtgccttcgggcagataaattccattgcggatatcattgccttctttatcagctttcgtattctgatagacaggggctacgagaaagtcggtaccatacatatattggtagcgggtagccgttccgtaggtatattcattcggatagtcgaggaacatggcacggatgagaggcataccatccaccgcttcacgggcaaagctatacgtgtaaggcatcagttccgatttcagtttgagatacatacggttaatggatgtagctggttcgcctaaagcatgggggtacttttcgttggcgccccagccatccatattcaactgcatgggggtaaatgttttccattggaaatcacgtatattgactgccgcattttttccaccgaagataccgtccatatccgagcagatattcggctggccggacagaccggaacctatataagtagggatgtgaaaacggatatattcccattcgcctccggtctggtcgcccgaccagatgccggcataacgctgtgtgcctgcccagccgtccagtgaaatgataaagggacgggcatcattgccataataaggcataatatgtcctacgtccgccactccgttcaatccgaaggaatagccggctcctacccatgccacgtcggttttgagtacacgcacaccggcatcacggacttctttcacgatgtcacgttgcaacaaggcgcttataccttccttcgggtgcaggtccgactgtgtccagaggcctatttccactccgttcttacgggcgtagtctcccaggcttttcagattggcgatgttgccgtccagtgtttccgtctgtccgtatccggctccgtaaccgtcgttcggaagtaaccatccgagaggcatatcatgattcttgtaacggtcgataacggcacgtgccgagaactgataattgttcttttcaccattcagagactccttgatgccgccattgtctttctggctttctttataacgctttccgtcttcaaagaggattcctttctcgtcttccttccagtagtcacggttgtaggcattgagatgtccttcgtaaaaaccgaatttgggcaacaaaacggggtttcccgtcaactgataaaaatcattcaacagggaaacgactccgtcgttgaccatatagaaaatatcaaggtaagaagaattgtgagacagtttcactatgtttttctctgttgctccaaagtcgtattcacctttccggaaagtgtaccacatcattccgtaaccattggtagaccagtagaaaggagcaggggaggctactccgccatccgtccagctattctgattttcgatggcaataaccttgcctttatgagagaaacgtccgttttgcacaccgcctccgtagaagtattcttcgggattctcctttaaggttacggtcacttctttaggaccgaatatcaccggagcgacttcttcgatcacacatttgccggttaacggattaaagactttcatcagtccggtctgcttattcagttcaatccgtacttgggcggtggtgagggtgatatatccatctttctcgtccaccgacagtccggaaaccttgcgtcggggctggtctacaagtatctgcgcttcaggtttcgcttcggggtcacggatgatgcctccggaattgtcctgaaagacacggaaaatattctctccgtaaaagtcgatagtcatccgttgctggttcgtgaacagtacatcaaccgtcgtcgggtttattttctctgcacgaaggattcccgaagtctgttcctggcggacggatgccgaagaaacgtcactctgatccgatgctgcggatgcctgtatggaagaaagggaaatcggacataagaataaaatggcggtaatacgcctgagatgtcgtaaagagatgggggtttcttttttcatgtttttatttatttggtattagaaattaagactgttaatgtcagattgtaaaattactcgtttggtaataaatacacttcatctttgggttaccctaaatcagaagctgttttattattatttattcacaaatcccatagggataagcggaggtcaatagcgtgtcaccttattttttaaatctaatccgatatcttgtacaacaaatagcataattcacttatccatcaataggacgctgttgccggaattcccgttcgctttatcaattctacaatccggtccagttcttcatgagtggctttctgcaggtcatggtcgggagtctccctgtcaatcgtatagatcatcacttgactgggagcgatctccttgactgcttccagccacgggagcacaaactcatcggatgtattattcatatcttttccaaggtaactacctttcagaaacatagtctgaataatacaatttcctttgaattctttcatcttttcgatgatcttccttacggaatatttcccgttgggacgatccaggagatgaatgtattcttcgttcaccgtatccagcttcaggatattattatctatcttgttcaatgcatcgaatactgcaggacggtcaatgaaggtagaattgctcaatacacttacttttgcattcgggaaatagtggtcacgaagtgccagtgtatcttctatgatttccggaaaatgagggtgggcagtcggttcaccgtttccggcaaatgtgagtacatcaggggcgggaccgttcttctgcatatctttcagcttttcttccagggcgatgcgcacttcttcacgagtgggcagatgcttcttcggacgatggtcggcattgaagccgcattcacaataaatgcagtcgaacgagcagactttgccgtcttccggcaataagttgattcccaaagacacacccaagcggcgggaatgaacagggccgaagatgggtgaaggaaaaataatagtcatctttttattaattgttttaatatgagttcaatatcaatacgaacgtttatcacatcaaactcacattattttatcatttactatttcataatatccagaggcaaagatactttaaaacttaatacggagttgcatttgtacgtcagcttttttatttccaaggattaaatcattgccggaacctatttcattccggtcgagataaacggtttctccgaatttagttataaacatccaatgttcattcggttcatatctcagacgaacagcacagcgaaatccacggccttgaaaggaaggagtgtaaaatgtataaagcaatcccttttctgatacatatacccgcgaatcatagtcgtctgtagaaaaataactgccttgaacgtcagcaaacagcctggtccaaggcagttgggaggacatcatttgtgtaacttgatatcctttactagcagccctgtcttgagaatgaaaatggttgtaatctaaagttgtacgacagctaaacacatctccataaaaatagttcaaacgatatcgaagttggtgatgaaaaataggaagcgttaggttttctttgctacctgtcaagtcacgctctttctgtttataacgatatttcaagtacattgtcagattactgtgcggagtaaacgtagcctgaagcaatccgtccatacctcgggaaggtttactgatccggtatttcttccacgggaaagaaaacagatcgaaggaagcaaggatgtgccaatggcggaaaggggaagtttccatccccaaataatatccctgttcgttttgaaccgcacttccttctccaaaagaatgggcgaacatagcccaataattatatgagtagtatcgttgtacgatcatcaactgagttccttccaccggtgaatactgaagacggttcaaagtagcactgccttgttttcccatagccgtctctccttggaaagaaaagcgatgccagcggtaagcatagtctattcctaaattgtagaactgatttccatgaatgttgtattgggaataacctgttaattgcggttcataaggtcggttgaaaacatagtaaataccggtgatacccagccggatacgattctgttgataactcatgtttccaccagtcagctgcatggtgaatacgttcttcttatcggcttctttctgactgcggtgtagtccggttttgtagatagaagttatttcgccatcggtcagcacaccgtccagcgaacggtgtgagtaaaagccggatatactccattgctttgtaatgcttaaggttgccgccgctccccgaaaataattagtttcgtcagtagaagaatgtttcctgattcctccgctgcgggtgttgaaagaagaagcatatacggtctttcccagtaagtaatccgtgctgatcaccaatccctgtccgaaacttaaccgatagttaccaacagccaatgtttttaaccgcccacaatctttgagtaagagataaaaagaataataatcatacccttgacgattgtgcagagcaaagaaaggttctccggcatccttctccgcaacgaaacctgcatagagctggtcgcgataacggaaagcatacttaacagagttataaacagaaggtcccaaataggtatgttcataaccttttcgcttgtaaaacggtatatctatgcgagttatcacttcattctttccatacttcattgcgcttttcaacatagttttccaccgaaaagacgactcattgttaatagctttgatacatacgaaaggcaatagatactgaatagtctgcctgtccatatcctctatcaactgaagttcataaagagttttcatctgcccatgcacgtatatataggctagcagatgttcaatctgaatatcactgagaaaaggaaattgttccagttgttgacgggtagcccggtttaaatctacaggttcgtgaaggcggacggacagttcttccagttcattctcccaattgggttcattaacagcattatcaacactattattaacagataaatcttcaaaaatatcttctataagactttgagaagggttttgagcactacaagcaggaataatgaacaggctgtttataatacttatcaaccgaaatagttgagtagttttcatcaataaattatttgtttacaccttgcgtttttacagacaagggcgcaaagatactttaaataggttaacgtctaaaagaaatgtctgaataataaaattttaattctatttttgtaacgtgaaaaggagacttaacatagtaataatgatggcgtttgctatggtctgttcatcgaagatgcaggcacaggacaggcaaaccatcaacggatacttggttccaatgtgtatctacaacggagataccattccatgtgtccagttaaggactgtttatatcttccgcccgctaaaattcaaaaacgaaaaagaacggctagaatactaccgcctagtacgtaacgtaaagaaggtatatcctatctccaaagaaattaaccaggctattattgaaacttacgagtatcttcagacattacccaacgagaaggctcgccaaaaacatctcaaacgggtggaaaaaggactgaaggaacaatataccgcacggatgaagaaactctcttttacacaaggcaaactcttgattaaattgatagaccgccaaagtaattccaccagttatgaactggtgaaagcttttatgggacctttcaaagcaggattctatcagacatttgccgcactgttcggtgccagtctgaaaaaggaatatgatccgttgggagaagataaactgacggaaagagttgtgctgctggtagagaacggacaaatctgattcaccttgtcataaggttatcaacgttgttattaaccatcatatttctattaaatccaattccactatcaccataggaaaattaccccgctttatctgacttctaaggtattaacagttgacctgtcaggtgttaatagtctgcatgacaagtattaacagttgagaagtcagctattaatagctgtgatgccatctgataacagcttgaaacaggatggttaataaacactgaatcaatcagactcaaccaagagtaagttgctacaatattcttatcatcacacataattatgaacagaaaaaaatagttggttaatagcaagttaactatgatatcaaccacttattaactaattattaaccgactgattttacaccgtcaacgcagctttttgaacaaatcccagatgacaatgcccgttgttacagacacgttcagagaatgcttggtaccatattggggaatctcgatacaaccatccgaatgatcaatcacttcctgttgcacccctttcacttcatttcccattacgatagcgtacttcttcgtcttgtccagttcgagtcgatccagcataatgctgccttccgcctgttctatcgaataaacaatatatccttctttacggaggttatcaacagcatcaacagcgttattaacatacttccagtcaacagtgaactctgcgcccaaagccgtcttatgcatttcggggtggggaggggtggccgttattccacacagatagatacactcgatacggaaagcatccgacgtgcggaataccgaacctatattatgcaggctacgaatatcatccagcactaccaccagaggcagtttttctgcttgtttaaactcttcggcactgatacggttcagctctgttattttcagttttcgcatacgttgttcatttattacgtttcggttgcaaaggtagttcttttctgttaacagaggtgttgataacggcttaaaacctgtcaaaacaatcgggaaagaatttgaaaaataattcttgcattattcaaaagaaggtataaggggccttcattatgaacattccaaaaaacaaagacaaaactttctatgcagacatcaacatatttttcagcacttatctgcctgtttatatccataaagtttttaactttgcactttatcaacagggagttaatagcattctcccatttgatagggcttacattgataatgaagataataaatagtcaatcttccacctttccttccgttcataacggactcataaagcagaagtatggactaataacttatctggcaagaaaaatcgtatttatttgctaacactattaacaggctatcatcactaacaaaggatttttttaaaaaggaagaaataaaagaatattattatgaataatctcataaaggctattaatgagctgaagaaagaaaagaatgcaatcattctggggcactactaccagaaaggtgaaatacaagatatcgccgattacgttggcgacagtctggcgttggctcaactggctgccaaaacggaggcggatatcattgtgatgtgcggcgttcactttatgggtgagacagcgaaggtgctttgtccggataagaaagtgctggtgcccgacatggaagcgggttgttcgctggcggacagttgtccggcggatcagtttgcgcagtttgtcaaagagcatccggggcacaccgttatttcgtacgtgaacacgacagctgctgtgaaggcagtaacggatgtggtggtgacttccactaatgcccggcagatcgtggaaagttttcccaaagatgagaaaataatctttggtccggaccggaatctgggaaattatatcaactcagttacgaacaggaatatgttgctttgggacggagcctgccatgtgcacgaacagttctcggtggaaaagatcgtggagctgaaaacacagcatccggaagcattggtgctggcacatcccgaatgcaaaagcacggtgctgaaactggcagatgtggtagggtctacagctgcactgctgaagtatgcggtgaaccacccggagaatacgtatatcgtggctaccgaatcgggtatcttgcatgagatgcagaagaagtgtccgcagacaacgtttatccccgctcctccgaacgatagcacctgtggatgtaacgagtgtagctttatgcggttgaatacgttagagaagctctatgagtgtctgaagaatgagtcaccggagattaccgtagatcccgaaatagcggagaaggcagtgaggcctattcagcggatgctggagatttcggcgaagctgggattgtaggcggaagttgaaattggtcttctatgaagatatggtaactcctctttagttcaatggattgttgactaaagaggagttattagttagcagtgaaatcatatatttttatgagatcctgttcagagtgttgtgaattaatatttgagctgtcaggtatttatatcattctgataatttgatacaacttccttattagtgaatagtctagtttataattttagtgtatttattgtgcctccaggcggacaacaaatccaccgccttttgccatatctatattcaatactgttttgttatccactgttcttttctctaccatgtattctttaggttgctcgtaagagtttggagcgtctttaaagatagttgcctgataggagacgttgtctttcaggaagctgaggttcacttctgtagaacgggtatcccagttggtcattccgcctacataccagtcgttacctttttgttttgctgttacgatgtattcgcttaactttgcttgcaatggcaaggtcttatcccatactgcgggaattttggataggaagtcgagtacatccggatatttattgtattcagtgggtgagtcacataaataagccatccattggtcgtaaatgacaaacatggacaattcatgcgaacgtgttcccatgctcataggcggagtattatctatatccatcggtctgaattcatcctgagtgacacttctcatggatcccggagtataatctgccggtcctgccaataggcggatgaaaggaaaacgagtgtgatattcgggagttaacgtcttttcccagaagttacattccgctcctcttactgcttcatagttcagtatattgggatacgtgcgatgcaatccggtaggaaccgggcaaccgtggaaaatagctaccatttgcttttcggccaggcgttctgcaaattcttttccccatcgcatggctatttggtcattccgttcgaaaaagtcgatctttgctcccgatacaccgtagctgtgcattttggcgatccagtcacttggattctctctggcacaactagcccatgtccagacgataatcttcacattcttttctttggcgtatgagcatagttctttgatgtaatctttggaccatccggcatccaaggtcatatattcgatatgattctttgaagcccagtctacgtagtatttatataactggagagaaagttgcttgtttccactggggaagtcaacaccttccaaaacggctttgtgccaccattcccatgcactctttcccggttgaatccaggaggtatcggtcagacggcaaggatcggccagtttgtataccagttcgttgttcaataatgatttatcatcttccgaaacgatgatgacacgccacggaaaactacggtttccatcagtctttgcgatgtaattctctctggtaacaaccaaatgattggaataccagtagtaaggattggacggatcggagtctattgtttctttcgggtagttagcccattttccgcgcatggagttgtagccgttggattccatatacaaagccggataatcataggtatttgattctgttacgaccactttataaggagaatcgggatattcgtataataccggagaaacagcaaaacgttcgtaaggaatttccaacggacctttgtagactttatagagtctttcaaagtttctatatccttgatgcacctgatgggtacgtccggattgatccgtttcgccggaataattagcatcgcattccggataatagatggtcggggtggaagcaaagttgaaaatagcatcttcactgatgatcgtaatttctccgttgagacgggtggcaaaatgataggccactccttcatcataagcacgtactacaaggtcgcagctgtcgttgaaagaaacggtaagttcattataagcatcctgtaattctttgtttttaccaacaaagacgtcgatagtctgattcacctttcttttctttgccgactttacacttccgttgccgattactctgccgtccgccagatgtaatccgatggaagaaggaagtataagttgtgtattatcgtaccatacttcgtattgggtacctttgtctattttcagtttaatcttcagttttccgttaggagaaaccgtttcatatttctctgcctgtagcgtgcagcttaaagagaataaacaaaggagtattaaataactgatttttttcttatccatataatgtgttttattgagaattaaagatgttattaatttaattgtgccaacctttttttcttaaataatcgagcaaataagcaggttgatctgtttgtaaaatccgggctcctagctgttcgatcagataaccgtagcttttttccggatcggtcagtgcaagattatcatcatgatttcctgcaagtgatccccataatgtgttataccaaatcaaacttttcttaaaaagtaattgttttatttttggaggaagcggatttttggggtctgaataaataatttcgaaagcagcaggacgtaattctttcaaatagtctgtgattattttctcagcttctttgttacctaaatctattactggcatatataaaactttatccaaataagaaccaaattctcgtttgacagtttctataggctgtcctcctttcatgattacttgattttgggtttcggttttttccaatatagcatatacatcgtcaaaaatgtcatatgctttgtccaaattaaccatgatttttccttttgctgttaacaaagcttcttctaaagtgggcacaacataatttgttacttttccatccttatctttcaattttaacttttttatatctgccagagtccagtttttaatttctccttttccagtggtagtacgatctagtgtattatcatgcattagaatcagttgtccatcttttgttttttgaatgtcaatttctacaatatctactttcatagcaatggcgctgtcaatagcagcagttgaattttccggtgcgctacgccaatttccccgatgagcaacaactaacactttgtttgattttggatttaagaaagtatttttaattgtttctacatgttgttgtgccgttactatgcaggttgataaacaacagataattaataatagagttgatttttgatttttcattattgccatattaaaatagaatgaataaggtttaatgtactaatacattctttataactttgatcacttgatttgctaaagctgaataccctgcgtcgatcggatgtgtcccgtctccgcctgcataatattcggggtggtcgattactaccttccataagtcgttcacttctatgctggcacgattgatatgtttcagtgcaatctgattacgtacattcaaccgttcggtgataggggcaaactctttcattccttctccggtacggacgggagtggtgtttgcccagatcagcttggctttaggggcgtatttacgaatgattttgattaattttgggaaacttttatcatacttttcttctgtataatcgaatccgtgcaaaccattattgaaatggataacgtcgaactttgtatttttgagtactacggccagttcttcgattaaagccggatcacctacacttttcgaattggagagccgtcctacatatgctttttctttcagagctgcttctacttttccgtaatatccgcgtgtgatggaatttccgataagcagtacgtgtggaagatctgttttgttagctccgggaatccaaatatcagaccattcgatatattcacgtgcaatctttttctgtgcataagtgaaaatacaaagtgacagtagaataaatgtaataaaggtgtgtttcattattttctttttttaatgggttatgttatataggttcggatacaaaattaggtaatagcagaaagattatatgtgtacaaagcaatcaaaaaatgaaatatttgcagcaaacattctattttttgattgctttatgtttataataaggtatagataatttctatctttgtgaaaaaagtaaaatttaaagatcaatatcatgaaaaagtacattttgtttatgatgagcgtttggttcatccagttggctatttttgcccagtctaggataatagaggtttttccggagcagggaaaagatattgaaaatatagcgttagctttaaaaaaagctgctgactgtaaagggaggccagttactgtaaagttttcactgggaatttatcagttagaccgtgcgaaatcatcacaaatgttatattatatatcaaatacgacttctgagttggatgatcctgatccgactaaacatatcggattgtatcttaatacattaaagaatatcactattgatggttgtgggtcaactttattgatgaatggtgaaatgacaagtttcgtacttgataaatgtgaaggtattgttttgaaaaattttaatatagattataaacatcctactcaaacggaggttgaagtattggaagaggggaatgattatttgattgttcaggtacatcccacatcccaatatcggattgtagacgaacagttggagtggtatggtgatggttggtcttttaagaacggaatagcgcagtcgtatgaccgtataagtgaaatgacttggcgttcgtggagtccgatggagaatttgcttcgtacagtagaacttcgtccaaatgtgttatatctgcaatataaagcaaaaccacaagtaggactacatactatttttcagatgcgcgactctttccgtgacgaagtgagtggatttgtaaacaggagtaagggaatactgttggagaatatcaacttctattatttaggaaatttcggggtagtctgtcaatacagtgagaatattactgttgatcgttgtaactttgctcctcgtccaggttcaggacgtactaatgcgggatttgctgattttattcaggtttctggttgccgtggtatgattgatattaagaattctcgttttgtaggtgcacacgatgatcctatcaatatacatggtacacatttgcgagtaatagaatttttgtcggacaatcgtttaaaacttcgttttatgcatgatcagacttttggatttgaagccttttttaaaggagacgatatagaacttgttgattcacgttctttgttggtagtagggaaatgtaaagtaaaagaggcaaaattagtaacaccaagagaaatggaactcactctgtcaagtccattctcttcggaggtaatgcaacagaaagacctggttgttgagaacgtgacgtggacaccggaagtgcggattacaaacaattactttgcaagagtaccaaccagagggattcttatcacaacacgacgtaagtctctgatagaaggaaatacattctacggcatgcagatgagtggaatatttgtagccaatgatggattaagttggtatgagtcaggaccggtacacgacttgactattcgtcaaaatacgtttttaaactgtggagaaccgattattagcattgatccggagaatagagaatataaaggggcggttcataaaaatattactattgaagaaaattatttttatatgagaaaaaatagctcatgtgccattcgagcgaaagctgttgatggcttgatgatacgtcataatttgatttattctctagatactgaaaaaaataaagagtctgattttattcagatgtataattgtaatgaagttacaataaaagaaaatcgggtacagttgcaccacctatttaaatgaattctatttcaattttaaaagaaatagataaatatatagtaaaagatttgattatagtaaaccctggaaatttataatacaaacttccagggtttatttttataagaataacatttgatgaatagtttaataaaatgaagaactttattcagctacactccacaatcttactgacttaaattctatatttctacagatatctgagaaagatactacccagcctacggtaatagttttttcttctgttagttcaaatataggtaaggcagatgttttattagtatgttctgactcaaatttgaggtaagagaggataatgtctgacttttccaattcttcattgtcgggtagtgattcgccttgagctacagcaaaatggatattggtactgccagaacctatatttgcggcgttttttacttcgatacgcatttcatactttccttttggtaaagtaaatgtttgccagatctttccgttgtcataatatccctgactccattgtgttgtttcgaactgaattgttccatcgttatattctgtgaagccggcacctccattggcatttttagtttccataacttcattccatttccaatcgtaaggttttccccatttattgcttacatcatatcctctaaatggatatccggcattcttaatataaagactggttaggtcttttgtaatgccaatgtaactttgggaaggcaatgtaacttctttatattctgtaacaaattcgtccaaggaagttgttgtcggtttatatatactattgtaccggagtattccatcagctttaaaattgtcgagttctgttgtagtctcgtcaactgaaatatatttcgagcctaaagttccgtcctgacgttcatattcaaggttacagcctactaaaccgtctcctcttgatatattccaattcagtttggctgcccatattctttctgattgtccactttcatttacaatttctttttgttcaggagagatactatgtaaaatccggttggttaatgcttgttggtatagttcgccatatgcataagcagatacctctgtcgggatagatgtgttgtttttgggatcataggtgactatcgagaagtcatattgtccttctgttaaattctctaacataaattcgaaggtttctcgtggttccgtacgttctattggaaactctttaaacttttcttccaatgtaataggatctttgtaactaataacacattttacctgatttacaccgtacatcattttcccttctattttgattctattttttccagtaaaagctttgagtgaatcaagttttcctacatagattttttctccctcgtctagataaggctgaataccatccagcatgccattacacgaatagaaaaagcacaggatactacagagaatcaatatatttatttttttcatacttttgctttgttaaaaggttattgtatcggggttccgtagaaccaaagttgctgcataactaccaatccggcaccgtcatgagtagaaagtattttaaatcgaatgtatcttactggaggaatatctgccggaaattcaaattcttctcctttactagcatatgttatatcttcttctgaatttgaaccggcgggccatccggaaggttttatactttcacaatctgccagtttggtccatccgtcccaacttccgtccgaagatggtaaatcagaacgtccccatacttcccattctttgatagcacctgcacgatagtaataactacctcccatggagcgttgccatgaggtgaagcggcttaattgagcggtttgacccatatcgaatgtaaaccatacaggaaactcggaaggattaaagtcataaccgtgagcataattccaactgtttaatccatgatctccattgaataaagactccaaagtatgacctgcgttgtccatctttatatcattggctagatagaaagttttgaatttggtcaaatccaatttttcttcatatagtggtgtcaaggttgttaagtattcctctgactggttatcatatagatcgcggacacggactttaaaatcatgtggttcggcagagaaccctcggagtgtaaagccgatgttttttacagaagtatattctgtatgttctacattccaattaccttttgaatcttttgtagagacatcaaagatgagatagtttctgcctccatttgtagtatgtatataaatacctccgaatgtaggatttacttctatttcttcaatggcagtaaggtatgccggttttccaggtactatttcggtgatgatagcttctccttctttctccattttgttaacggctgagattactagttttttcgggttcgtattaccgaaaccttctattgtcgtttcatcagtatagagagaagcacgtgcttccatttcttttccattgtcaagtgtatattttattttgatatacaatagatcttcgtctgttggagcagtgaatttcaatgtcactccaccaggaatttgttcataggaagtcacttgtactgtaccaggagcatgtccactgtcatccccataaggtttatgagtttctacatcttcgcaactgtgtagcaatactgccgcacatgccatccatatataatataagattctttttttcattgtttttcgatgtttataattaccatccatacgtttgaattaatttgtcgtctacttgtaagtcttgtttttttataggccacaaatagtctttagttgtaaatgcgcgaggaacaaaaagagttgtgactttataaaagtcttcttctatttctccttgtacgttccatcctttaatggatttactcagttcttttgaagcgtctttccatcgtctgagatcattgtattgatgtccttccaacgcaagttcaattttacgttcctgtttgatgatacttcttatcccatctttagttttaggtttggtaggatcattgctgtacttttcccatgctactctgacatctcctatatcttcggtctgtccaagtacaccttttttcaatccggaacgttcacgtaccttccgtaggtatgtataaacttcttccggtacattattatcaccttctgcagcttcattaagtgattctgcatacattagatacaagtcgcctaatctgataatagggaatgggtattcgtagactacttgtgaagattgagttatagcattttgataatatactacttttttagcgaaataacctgtaatggagtagttaaatccccatttgtttccagagtttcttccatatttaccatctacataattcaagtcattgacatctgtacgtccgttaccataccaagtggaaccatcgaaaccgagagacccgtagaagcggggttctctgttgaagtgaagtacggcagtggtccagcctgttcgcatgttatatttatcagcactagtcacttgtcgggttgtgtaacgattatcatagtttccgcttgttaaccattctttgtcttcgtcaatgggcactccatttttactgtaaaattgttccgctgtttccagtgtaggagcatatacacctgctgccctgctttgcaaaatacctcctgtcacttcaccgtttccactaccttgttttaaggaaggaagaatacaagccatagagaggttctgcaattcgttagtaccttgtttgcctacactccataccaattcggggttaaaacgttctgttaccgtctgacggatattcatactgtaaaatatttcttcgggtaaatcctgactataagacatatccatgctacaatcgtaaagcttgcatccgttggcttctgctgattcgattgccgctttgcaggcttccgcggtttttacccatttttcacggctgaattcttgattgatgagcggttttccttctttatttctaaagtttgcatactccttgttgccattgaagagaggactggctgcccataataggattttggcttttagggcgagtgcggcaggctgcgtcagacgtcccatttcagtagcttccatagtgatgaccggcggaaggtctttgtaagagtcatctattaattttaccataaagtctactacctggtctaccggcatacgggttacttttactccttcagacgaagttgatacggggagagcttcgtctacaatagggatagggccgtagtgctcaaacaagaagaaatgatagtaggctttcagtacatttacttcggctatccatctctttcgttccgaatccgtcaggtcgtttactttatgctgatctctcacataacttaggaaaatattacattcccggatggcacggaacataggaagcttacttcctccttctccatcccaatagttggcatatggcgcatttgtattctgcaatccgcgggctatgtaaaagctgacttcattatcaaaataagaatctttgtcggtataaaaccaacattcgtgtccggctcccataccgggtatgcgtttaacggaaccatgatcggggacgaaatgatagcaatttgccaagtaacgctgggctgtattcttgttgttaaatacaatgtccaatgttgtcacgttatcgggaacgatgtccaaataatccgaacaggaacaaagcaagcccaagctgatgaatagaatatatttcgtaaattttttcatatcgttgcttattagaagttaatgttaatgccaagattatatactcgctggatggggtatcccagaccattatttcccatttctgcatcccataacttaaatttactgaaggtcagcaggttgcttcctgtcaaatataagcgtaaggattgcacgcctatttttttcaaggctttctgtgagaatgtatatcccaattctactgttttcaaacggaggaatgaaccgtcgtgcatccaccaggtgcttgttaccatattattatcaacaagtgtgggagacaggcgaggccagaatgcatatatgtcgcggttgttttcagaccaatggtcgttagcaatgacatctaaacattgctgtacgcctatacgatcaccggcatcataatttacaaaaggggatgtatttctgggatcgatgaagaaagatactcttgcatttccctggaagaacatagaaaggtcaaaccctttgtaaccggcagaaaatccgaagccataggtaatctccggctgattaggatagccgaggaaagtctggtcttcatctgtaatctttccgtcgccattcaaatctttatatttgatgtctcccggcatagctccaccattgaaacttgtctgtgagggagagttggcaacatcgtttacatcaataaacaagcgttcggcaatatatccgtaattgtgattgatagcctgcccgattctggagcggtatccttgtccgtaactggcataatccagttcttcataaacttcatacctacctttggcgagtgtgaagtttcccattccttttatccagaaatctttgttggcaatataagaatagttggcagacaaatcaattcctcgggaggatgcttcacctatgtttgcgcttactccggcagaaagtcccatactagatggaatatgagcacgaggttggtaaatctgggtacggcgttcatagaagaagtccgtctggatttccaaagcactgttgaacatacccagttcaaaacctaaatttactttcttcgatttttcccaagtgatatagatgttgggataacgggaaacagatacgccgttcatatgattatcataatctgttccgaagaattgatcgcgatttccatcgttggggttcacttccgacaaatagtagaaacggtcttccgagcttccgatagcatcattacctaccagtccataagtcaatttgaattttagtttgtccactgtatttcgtagcggtatccagaagtcttcattagaaatgatataaccaagaccgaaagaagggaaaaagccgtaacgctcatgggcggcaaaacgttcggaaccattgtatccgaagttgaattctgcaaaataccttgaatcataagcataagtgaaacgtccggcaattccctggtttctacgtggtaatgattgttgcaaggtcttttcgcttgaccttttttcttctcggcgggtatataccaacattccgctagtagcgtgtgcaccgaatgtccggccatagctgacggctgcttctatataattggtggtgttgatgttcttagcaccttggtcataggataaatactcttctccttctacaatattggtcagcgtataactattgttcgttttatcatagttggcctgatagtaataaggattaatggcacgggtgaggtcggaataagaagaacgggtggtgctgaccagaactctggcatccaatccttgggtaataaaatccagtttttgtttcagttcggcttgtgcggccaccaataagttattggattctttatatcctcttaccatatctgcataaggattgatgtaagctcctttattggcattaccaaacagtacatgcgtgttattggcatactcgtctgttgccggataacttttaggatataagacaggactggttttcattacctttttatagagtccttcaccgctgtcgagcgggccggtataatcatcgaagtttccgttgacacgaatggcaaattccgtagttttacttaagtccatattgatatttgaccggacagaataacgttgccagttgatgttactgttgtaattgttaagcttatcatttttgattactcctccgtctttggtgtaagaagctgctacataatagcgtactgcactaccaccaccactcaggttggcgtttactcttgtggagagagcatagtcattgaataactcatcataccagtctactgccggataataatatggattagtaccggcaatggtattttctattttttcttggctatatacagtgtagttggcactggcagcaggattgttgggatcacgtcgtgagttaaccgcttcattgttcagtttcataaaattgacagggtctgtcaacttcaccttttttcggggagtagataccgactgttctacgcgaacagacactttaggtcttccagctgttccctgtttagtagtcacaaggattactccgtttgctccgcgtgcaccatacaaagcagtggctgtagcatctttcataatggagaactgtgcaatatcatccacatttaggcgggcgaggtcgtccgtactcaattcaatgttatcgatcagaatcaacggatctttcttgtatccgaatgttgtagcgccacgtacaaagaattgggcattatctttaccgggttcgcctgatgtctgaaaagcgatcagaccggacattcttccggcaagggcggttgtcaagttactgcttggcactttcaattcctgtggatttactgtagagacagcactgatgacactctctttcttttgcttggcaaaagcgactactgtcacttcgtcgaactcgttggtttcaggaagcagtttgatagcataaaaatctttattgtctatttttacttcctgctttttcataccaaggaatgaaacgactagtatctctccggttttcgcttttatagtgaattttccatcgatgtctacaattataccaccttgtctgtttttaattgtaatagtggctcctgccaaaggctcattatcatcaccggttaccatacctcttatttctctgttttgcgcgtatatattcgtcgcaaagaaaagacagagtagaaccagaatcagccgattcattttaaagaatgaataagttctttctttcatgtttttcatggataattttaaattaatactaggttaatacacttctgacaactagactgttgtcttgttaacggtggaaattctcgaattcgtttcatatattattagatttaaatgtgattattctcataaattcaatgagtcaaaattaggtgtttgcattgtttaaatgatgaataaacgctgcaaaaaataacgtatttactgcaaaatacttttgattaggagtattataaataatatttcctgtatttatattaatttgtatcgaactattcaaagtagaaattttgtatctttttattgcttaatcgaaaattttcaaagaagaataattagaatagcctacatttatagaataagaacctttatcaatcggaaacaatgcttttcctgtataatcataatatgtgacagtataacttaatgtatagttttgatttggttctatccctagtttagtgctaaaatagtatgttcccggaatccattctattttatattgttttgtaattggagaattctcaaaaataccatttatagcaaaaattatttttgctgaatgaacacctgatataagaggtcgcagagttccataaagttctaatacagaacttccgaatccatcaaaattgggtgctggaattaatccacattgattatagccttttagttggtaaggttctgaccaagtgcttctagagccatttggtgcatattcgtctacacatattcttataacaggatttccttttggcaaataatttccactaaaaggtattatatatgaatttaaagcttcacctgataatacaatatatggagtattaccaccatttggattataatatttccattctgcaccactttgatattgaagataaatattccattttccaatatattgagtgggatgaatgtaaaatagctgaatccaatttccataaacattctcaccatttatgataggatggagaggatcttgtacgactctagtcattatagtagtagtttcttctttttcataatcatcgaaataatttgtattacatgatgtaaataatattgttatacaagtaattaaaataagtaaaaagtttttcatgttaaataattttttaagttgaataataaaataaatattttcataaaaatgttgatactgtaatattttatataagaataatagttatgcaatcatctacattcattttaatttgtatcgaaccatccgcattcttcttcggaatgaatgtttttttgttcaatttccaacgatatgcttcagcgtttggaagacgaagaatgaattctgttgcagcggtagccttgaataccgtattttctatccgggcgtttttccagcttgcgtctatttcgatacctccacgcgcacaaagtcctttgaaacttccgtttttccattcttccggcagacaagacaataattcgatgcaattatcatgactttgcaataacatttctgccatacctgctgctccggctgtatttccgtcgaaggcgaaaatatcttcacctgctccggcgattccggccggggaaacagtgaacatattttcacgtgatagtttcccaagtaattgtttcacactgctataagctttttcagaatctttcaatcgggcatagaagcaaatcatattggcacggctccattctgtgtcttcccagtctttggcggccagacgtttttcgattgttttggcggcagcttgtgccagctcgggtgtcttgtccaatgtaatttgggaatagggataaagggataataaatgtgtagtatgacgatgattgggatgtgcctcttcgtaatcttcaaaccattcctgtactcctccgtttgtgctgatacggaaaggagggagttggctgatagcggtacggaggctgtcggcaaatgaggcatcgacatttaatatttccgtagattgcaggcatgccgagaatatctcataagccagtacacggtcgcaagtcggcatcatagatgcgcaaaattcttgtccttgatggcgaaaactgttttccggcgagatactaggacctgttaccaaatagttatttcgtgggtctattaccatataatctaatagaaattcagcattactttttaataatggatatgcggtattctttaaaaaatctttatcttgtgtgtaatcatattgtgtccataaatgagaggcaagccaagaagatgcagtcgggaataatccccaaagaatactacctgatacagctgtatatccccatggattggctgtagtatgtgcagtccatcctttacaaccatataaatcttttgctgtttttgcaccatgaattgataaatctttaatatagtcaaaaagagggagatgacattctgctaaattacctacattagcaatccaataattttgttcagtattgatatccaaatgataatcgttagtccatcccatatggcaagcgaggttatcgttaaaaaaaccttgtaaagctacaggtagaggagaattaggacgtgaagaagcgatcaacagatagcgggcatattggaaaaataatgcatctaatccaggatcagattctcctttctttacccgtgcccaacgttcatcgtttggtaggtgatcaaactttgcgtgatgctcaaacgaaagtcctacccgggagaaaagtggagaatagtcttctatatgttttttcttcagagtcttaaaatctttctttgatgctaattcaattgttttctcacattttattttgtagttgtaaccagagaacgtattgtttttaaaattggtacgtacatcagataataaagtgacttcagtagctttctcaatataaagttttttcccttcagcctttattgttcctccttttatttgtacagcaatacgtccttcaaaatgtactcctcctttaccatgtttttcaaattctgcattaccggtataaataagttggttaccggatgctactacatttgcctgtctgagtaatttcaattcaagttccatcgttattgcttttggacgactagcttttatatgcatagcaactacgtcatctggattagaagcgatacattggcgtatatattcagtattacctactttatagctaactgtatttatagcagtatgtaaatccagttcatggcgataatctgatatttctccttgaggatatgaaaaatttattttcaagtcacctatgggaagatgtgttcctactgaatgtgggctacctgccatcatatttcctgcgacatgattaccttctgacaagttattttcaaaaaatagctttcttacttgattgagtttttctcttccgaatggacgttgctgatgttcatcatattcccctgaccacattgttgattcgtttagagcgagtgtttctgtttctatgccaccatagatcattacaccaagacgaccgttccccaaaggaagagacttcatccattcatctgcaggtttatcataccataatttcattttattctcggttgccttcagtgacagactaccactaactagaagtgcggcccctattatcaggcctaatgttacgtttctcatgttataaaatagtttatttcaaaatgatattgcaaaggtataggagaagggaaaagtaaaaatgaacaaatgcggctattactgaaacaaatgcgtcaactcctttttatatactgttttttagtgtatatttgcgcgcacagccaaatataaccactatataatttatgaagaaacacctactacgattagctttcataaatggattgctattcttatctatttgtatttttgctcaagaatattctgatttttatttcacccgtgttaatggagaaaatggtttatcagagagtaatgtaaaagcaatcttgcaggatagctatggatttatgtggtttgggacaaaaaatgggctcaaccgctatgatggaacttctattctccaattcgattgcgatgatttggaggagggtacaggtaatcataatattggtgctctttttgaggataaagaaaggaatttatgggttggaacagacaggggtgtttatatatataatccggcggtcgatgtatttaaacgtttcaaaatagcttcatcagaagggataactcttgataactgggtagcggaaattctgtctgattcactagataatatttgggtgttgattcctgatcagggactttttcgttataaagacggaaaggtacatcattattcattgatagataaagacaatttaaaaaataataatccggaatgtatttgtatcaatgagcagggcgaagtatgggtaggtacatcaggaataggtttattcaagtacaattatcgggatgataattttgaacaatatttgacagaccgaatgggacgttcgttaattgacaaaacaattataagtatttgttttcagaaagaaaatgctattttgggaatacatgaaggagatttgctgaaatataatactcgaacagatgagttgagtgaagtttcgttccttggtgagaaaaaaacatttttgcgagatgtaatgtgttttggagatgaaatttgggtaggttctcttcatggaattttcattattaatgagaaagaaaataatgttattcatttgaaagaagacctgatgcgttcatttagtttatcggataatagtatttattctatttataaagattatgaaggaggaatttggattggaacaatgtttggaggtgtcaactatctgcctaatcgtatcttgacttttgctaaatatgtaccgggaagcgatccatattctttaaataccaaacgtatccgtggattggcagaagataataatgggtgtatttggataggtactgaagataatggtgttaatgtattggatcctcgaacaggtaaagtacatcagatatatgataatgttccaggtcgtctcattacactatcagtaaaacattatgaaaatcatatatatgttggattatttaaacaaggaatgaatgatattagtatacctggtgaacatcttaaatacgtcagtgataaggatttgggtattgaagaaggaagtgtatatagttttttaaaagatagtaaaggtcgtacttggataggacctgggtggggattatatgtatcacaatctaaggaaaggaaatttcaccgtgtggaagaagtaggatataactgggttttcgatataatggaggctagagatggtacaatttggcttgctactatgggaaatggtgtttggaaatgtgatcctaagaataattcttataagaattattcttataaggaaggagttgacaactctctaagctccaactccgtcagctccatcatgcaggacagtaaagggaatatatggttctctaccgaccgtggcggtatatgcagatataatgaagcgcaggacaactttaccactttcagcatcgaagacgggctgccggacgatgtagcttacaacatattggaagatgatgctggaaatctgtggtttggcaccaataaaggattggtcaagttcaatcccgagaatggagatgtacgtgtctttaccaataaggatggattgctgggtaatcagttcaattatcaatcggcattgaaagctcaggatggaaggttctatttcggcggggtggacggattgatcgcgttcgatcctactgttcaggaggaggaaaggccacttccgcctgtctacatttccaaattcagtatatataataaggaggtgacagtgcatactcctgaatcacctctgaaacaatgtatcgtacatacggatgaaatcgtcctgccttatgatcaggccaatatcagttttgacgtggccttgctcagttactctactgccgagtccaaccaatactattatcgtatggaaccgctggacagggattgggtacgggcagccagcaaccagaacatttcttatgccaaacttccgccgggaaaatacaccttccgtgtgcaggctactcacggcagtaagtccgagtcgtccacacgttctctgtctattatcattcttcctccgtggtggcagtctatcatcgtttacattgtatataccgtatgcattatcctgatcgtggttggcaccatcttatggtacaaacgccgcaaggagaaacaactggaagaacggcaaaaactgttcgagatcgaaaaagagaaggaactgtacgaatccaaagtagacttcttcacagagatagcgcacgaagtgcgtacccctttgacactgatcaacggtcctctcgaagccattgaggaaatggagatacaggagcccaagatgaagaagtatatcagtgtgatggtccagaacaccaaacgcctgctggaacttaccggacaactgctggacttccagaagatcggtgccaacaagctgaccatgaaatttgagagcgtggacattaccgaacttcttgccggaatcgtggcacgctttgaagtgacatttagcctgaaccggaaagaattgcaattaaaatctacagaagagcaggtatgggcagctgtagataaagaagcaatcaccaagatactgagcaacctgctcaataatgcgctgaaatacgccagccagaatgtactggtagaactggaaaagggagaagacagctttacgattcgcgtcaccagtgacggaaacaagattccggcggaagtcagccaatatatattcgaaccgttctatcaggtggacagaaaggagaagccccgtaatggagtaggcatcggcttgtctctggcacgttcgctggcatccctgcacaaaggcacgatctatctggatacccgtcaggaaaacaatatgtttgtactgaccattcctttaaatatggagggcattaaacaggagaacaacaaagccatacagaaagacattgttgagctggacgaacatacgcccgtcacggccgatatgtatggatataccctcctgctggtagaagacaatgaaagtatgctgacctttattctcgaacgcttgcaggaaaacttcaccgtagagacagcgatgaacggggtagaagcactggaaatattgagaagcagccatatcgacttgatcatcagtgatatcatgatgcctgtaatggacggataccaactctgcaaggaagtaaaatcggatatggaactttctcatattcctattatcttcctgacagccaagaatgacatcgacagcaaaatcaacggtctgaaatatggtgcggaagcatatgttgagaaacctttctctttcaattatctgaaagaacaagtcctgtccttgcttgacaacaggcgcagggaaagagaagcctttgcaaaacgccccttcttctctgtcaacaatatgcagatgaacaaggcggacgaagaatttatgaataaggtgatcaaggtcattgaagataacataaccgatgataatttcggtgtagaacgaatggcggatatactctgcatgagccgttccagtttgttaaggaaaatcaagacactgttcaacttgtctccgctcgattttatccggttgatcaagctgaagaaggcagccgagtttattcaggaaggtaaataccggatcggagatatctgctatatggtcggcatcaattcgccgtcttatttcagcaagttattcctgaaacaattcggcatgacacccaaagattttgagaaacaatatcaatccggcaagcagatcattatcacgcaggagataaagaatgtcgaggcaggagagggcacaaaatagataaaatacctctcttagcccccattggagcttatttgccgtatttttatcattttttgaatcgtttgtatatagtaaaggagatgccaatccttacctttgtggcatacctcaataagagaaaaaggtttcttattcgggtatgctttatttttttacataagaacattgtaccatatgaaaaaccaaaagctactactaaaaaaaatgtcgggagtatccctgatgcttcttctgtttcttttcttttccaactgtgccagtggagacaagattttctctaccgatgtatggaatatcacttacgatgatcagcaaggggggatagcactcacctataagtcaaaaaatatttgtaacggaatgtatgcttcctatcaatgggaagggaaggaaatcaagacgactgactatgcccgccataaaatcagtacgggtaaagtttccgattctttcgggaaaggacatatatataaggtagagtatacggataaggaacttccgaagctgactcagtatttctatctttatccgggtaaggaatatatactgaccgattttacggtcgaagcgaaagaggaaatccgttccggcagaatggctcctgtcaatgtcgattctatatccggattcttgcaggcaggtgataaccgtgccctttttgttccgttcgacaatgacaaatggatcagatatcagtctcatccgcttggtttcgatacattggtgagttatgaagtgacagccatattcaataatgaaagccggaacggtctggtggtcggctccgtagaacatgataactggaaaacaggtatttcaataggtaagggggatcgtgataacattggttcgctggtatgttatgggggcatagcagatgagcagactcgtgacgtaaaggctcacggtgcattagcaggtaaaaagattaaatcccctaaagtctttttgggtttctttgaaaattggtgcgatggacttgaagcgtatgcaaaagccaacgctgtaattgcccctcccaaagcatgggagaaagctgttccatttggttggaacagctggggggcattacaattcaatctgacttatgagaaagcgatggaagtctccgattatttcaaggagaatctgcagaacaatcattttgtaaaccctgatcagactgtctatatcggtctggattccggttgggactgtatgaatgaggagcaactgaagtcatttatcgaaaagtgtaagtcgaacggacagatcggtggtatctactggactccgttcaccgactgggcacgcgatccggaacggacggtagatgcagcaccggaatataaatacaaagatatctatctctatgccaacggaaagccgcaggaactggacggcgcctatgcagtcgatccaacgcatccggcagtggaagctatgatgaagaagacttccggtttgttccaccgtgcaggattcgagtatgtgaagatggacttcatgacacacggtgcgatggaagcggacaaatggtataatcctgagattaccacaggtatacagggatataattatggcatgaaactgctcaatcaatattttggagatatgtatatcaatctctccatttctcctgtttttcccgctcagtatgcgcagtcacgcagaatagcctgtgatgcgtggaaccagatcaaggataccgaatatacattgaacgctctttcatacggctggtggcagaagtatatctaccaatataatgatgccgatcatattgtactgagagatgctaccgacggagaaaaccgtgcccgtattacttcgggggtcattacgggtatttacattacaggagacgatttcagtgcgggaggaggaaaagacgccaaagagaagtcacagaaatatctgaccaatgcggcagtgaatgcggtggcgacaggagaagtgttccgtcctgtggaaggaaacggagagaagtcggaacatatctttgtaagaaagacacccgatggtcgtttccattgtgcggtattcaactactcggaccaggaacagacaactgtgctttcgttggaaagaataggattggacaaggcacgcaactatcaggtgaaggagttgtggagcggcaacgagacttctgccacaggacagcttgaagtgaccgtaccctccaaagacgtgcaattacttgaatttaaataaccgaagaaatgaaaaaatatcaattaacactcttatcgttatgtgtggcagcctttgcgcaagcgaaggtcacattgccgtcattctttaccgataatatggttattcagcaaaacagtcagctgacgttaccgggaaaagcgaaagccggtaaacaagtgactgtgaaggtgagctggaattatgagaaatatacggctaaagcgtcagctgatggtcattttagtatagaagtcccgactccgcctgccggaggaccttttcagatcactgtttcggatggtgagaaactggtgctgaacaacgtcctatcgggagaagtctggatctgttccggtcagtcgaatatggaaatgcccgttgccggatggggaaaagtgatgaattacgaacaggaggttgccgatgccgattatccttccatccgtctgttgcaggtaaagaagaccgttgctttctctccgcaggataacgtagaaatgaatatgaacggctggcaggaatgtagttccgctactgtaccggagttttcttccgtcgcttatttctatgcccgtaagttgtggaaagaactgaatgtgcccgttggggtgattgactgcacttggggcggcacacctgccgaatcatggacaagccatcagacattgaagcaagtcatgggattccagaaaaagatggccgaaatggaaagcgcaggcttccaaagagagaaacttgtcgaactttaccatcaggaaatggacgagtggcttcagcagtttgatgccagggatgccggattcaaagacggagttccccaatggatatcagctcttcagacagggaatggatggaaaccgatggaactgcccgcctactgggaaacccgcggactgaattttgacggtactgtctggttccagaaagaagtggaaatacctgctgactggagcggtaaggaaatctccttccatctggctatgatcgacgacgacgatatcacttactttaacggaaaagagataggaagaacttcgggatgtaatacgatgcgtacttataagattcccgcagccttggcaaaggcaggtaaaggggttatcaccatccgtgccatagattatggaggtgaaggtggtatccacggagaacctcagcagatgtatatggaagcgaacggcaagaagatttccttggcgggcaactggaactatcacaccggagtatcgatgaccggcgcaccttccagaccattgtctcccgaaggaaccggctggccgacatcctgttacccgaccgtactttacaatgcaatgatacatccttttactgtctttcctatcaagggtgctatctggtatcagggagaaaataatgtaggattcgacgagcagtacagggtacttttccagtcaatgattacagattggagaagggcatggaaacaggattttcctttctactttgtgcagttggccaattatctgaaaccggaagaagtgcagccggattccaaatgggcggctctccgtgatgcacaggcacatgcgctgcacctgcctaatacaggtatggcatgtgccatcgacctcggcgaagcttatgatatccacccgaaaaacaaacaggaagtaggaaagcggctggcgcaagcggcattggcgaagacctataacaaaggtacatacgaagtgcccgcattccttggataccgcatttcgggacgtacgctgattcttagtttcgatcaggaagtagtagccaaagaaggtgctccgaaaggctttatactggcgggaccggacgggaaatacgttccggcacaggctaccatccggggaaaagaagtcattctacaatccgaccagatagaaataccgacggcggcttgctatgcgtgggcagacaatcctgtttgtaatctatatggcaagagcgggcttcccgtacccccgttccgcaccagagaataaatatcaaccataacaatgtaaaccatgaaattaaaagcattcttacttttttttctattgagttctttttctcttttgcaggctgccgacaagcctctgatcaaaatagaaaccgaacggaccagccttatctatcaagtagctgacaacggacgtctgtatcagaaatacttgggcaaaaagcttaaccatgattccgatatccagtatctgccacaagggactgaagcttatctgactcatggtatggaggactactttgaaccggctattcacatacgtcataatgacaataactcttcattgctgctgaaatatgtagatcattcgagcaatgccatcggtaacggggtcaacgaaaccgtaattacccttaaggatgataaataccctgtgactgtgaagttgcattatgtagcatacggcaaagagaacattatccgtgcgtttagtgaaatcagccatgaagagaagaagcctgtgatactttgcaagtatgcttcatcaatgcttcacttgaacagcagcaagtatttcctgactgaattttccggtgactgggcacacgaagccaacgtgactgaaagagaactggctttcggcaaaaaggtgatcgatacgaagttgggtgcacgtgccaatatgtttgtatctcctttcttccaactggctcttgacaatccttcgcaggagaatgcaggcgaagtgctggtaggaaccatcggatggacgggtaactttcgctttactttcgaagtggacaacaaaaacgaactgcgtattatcagcggtatcaacccgtacgactccgaatacagcctgcccgccaaagaagtgttccgtactccggacttctatttcacttacagcacgcaggggaaaggtgaggccagccgtaacttccatgactgggcgcgcaatcatcaggtgaaaaacggtaatgatacccgcatgactttgcttaacaactgggaatctacctattttgactttgatgaaaataaactgatcggcttgatggatgaggctaccaagctgggcgtagatatgttcctgctggatgatggttggtttgccaacaaatatcctcgtagcagtgaccatcaggggttgggcgactgggaagagactgccgacaaacttccgaacggagtagggcgtcttgttgaagaagcacaaaagaaaggtatcaagttcggtatatggatagagccggaaatggtgaatcccaaaagcgagctttacgaaaagcataaggactgggtgattcatctgcctaaccgtgatgaatactacttccgcaaccagatggtgctcgaccttagcaatccgaaagtacaggatcatgtattcggcgtggtggacaacctgatgaccaaatatcccggcatcgctttcttcaaatgggactgcaacagcccgattacgaatatctattcggtgtatctgaaagataaacagtctcatctgtacgttgattatgtgcgcggactttacaaggtgctggacagaatcaaggctaaatatcctaatcttccgatgatgctgtgtgccggtggcggcggacgctccgactatgaagcattgaagtacttcacagagttctggccaagcgacaataccgatcctatcgaacgtctgtttatccaatggggctattcgcagatcttcccaagtaagacactgtgtgcccacgtcactacttggaatcgtggaaccagtatcaagttccgtaccgatgtagccatgatgtgcaaattaggattcgacatcaaactggaagacatgaatcagaatgagcacttgtactgtgatctggcagtcaagaactacaaccgtctgaaacctgtcatccttgaaggtgatatgtatcgccttgtttctccttacggaagcaaccatacttcttccatgtttgtaggcaaggacaagaaaacggctgcggtattcgccttcgatatccatccgcgctatgcggaaaagacactgcctgtccgcttgcaagggttggatgccgataagatgtaccgtgtgaaggaaatcaatatgatgcccggcagcggttcctcattgaagggtaacgaccaggttttctccggagaatatctgatgaacgtcggactggatcttttcacaacgcagcagctcaacagccggcttattgaaataacagcagaataaaaagccatagacataagaaacatatcttataaaaacaccacgaaccatgaagaaattacttttaagtgtatgtgcattttcattgactcttgctacgttgcaggcaggggaaatcactaaatatgtaaatccgtttattggaacgggggccatcgatgggggactttcgggtaataattacccgggggcgacctcgccgttcggtatgatacagctttctccggacaccagcgaagctcccaactggggagacgcgtccggatacgactataaccggaatacaatcttcggtttcagccatacccgcctgagcgggacaggagcttcggacctgatcgacattacattgatgccgaccagtagcggacgcacttcttccgcattcacgcacgacgaagagaaagcccgtcccggctattatcaggtaatgctgaaagatgaaggtattaatgcagagcttaccactactcagagaaacggtatccaccgctatcaatatcccgccggtaaagatgcggagattatactggatatggaccactcggcagataagggcagttggggacgccggatcattaactctcagatccgcattctgaatgaccatgcagtggaaggttaccgtatcatcaccggatgggcgaaactacgcaagatttatttctacatggagttttccagtcctatccttacttctacgctgagagacggcgggcgtgttcatgaaaacacagccgtgatcaacggtacgaatcttcatggctgtttccgtttcggccaactgaatggcaaaccattgacgtgcaaagtagccctttcgtccgtctctatggagaatgcccgtcagaacatggaacaggaagcaccgcactgggatttcgaccgctatgtggctgctgcggacgctgattgggaaaaacaactaggaaagatcgaagtgaaaggtacggaagtgcagaaagagatattctatacggctctttaccacaccatgatacagcctaacaccatgtccgacgtgaacggcgaatacatggctgccgactatacgacccgcaaggtggcgaacaatgaaactcattacaccacattctccctgtgggatactttccgcgcttctcatcctctctacacattgctggaacccgaacgggtgactgacttcgtgaagagcatgatacgccagtatgaatattacggctacctacctatctggcaattatggggacaggacaattactgtatgatcggtaaccactccatccctgtgatcactgatgccatcctgaaaggtattcccggaattgatatggagaaggcctatgaagcagtctataacagttcggtaacctcacaccccaactctccttttgaggtatgggagaaatacggctttatgcccgaaaacattcagactcaatctgtctccatcactctggagcaggcttttgatgactggtgtgttgcccaactggctgcaaaattgaacaaggatgccgattatcagcgattccacaaacgctccgaatattaccggaaccttttccatccgaaaacaaagttctttcagtccaagaatgacaagggagaatggatcgaacctttcgacccgtatcaatacggtggaaacggcgggcatccgtttaccgaaggaaatgcatggcaatacttttggtatgttccgcataacatccaggccttgatggaactgacaggaggaacgaaagcctttgaacaaaagctggataccttttttacctctacctataagagtgagcagatgaatcataacgcttcgggatttgtgggacagtatgcacatggtaatgaacccagccatcacgtagcttatctctataattttgcaggtcagccgtggaagacgcaaaagtatgtcagtcatattctgaacacgctgtataacaacacttcttcgggatatgccggaaatgatgactgcggtcagatgtctgcctggtatgtattcagtgcgatgggattctatccggtcaatcctgccgacggccggtatatcatcggttccccgcttttggatgagtgtactttgaaactggcaggtaataaggagttccgtatccggaccatccgcaagtctcccgaagatatctacattcagtcggtgactttgaacgggaagaaacacaaagatttcttcatcactcatcaggacatcatgaacgggggtacgatggtattcaagatgggtaagaaaccatccggatggggaaagtaaacagtatgaattcagacattgtatctaatagaaacatggatgagttatatcatatagggcaataaatattatagccttgtttctatataataagagactgtctacctcctgacagtctcttattattattttcttatttaacctcttcggaagtctgtaacatctggaacaacttgtccagctttggagccatgataatctccgtacggcggttcttgcttctgccttccgctgtttcattgtcgtcaacaggcatatattcgccgcgaccgctgggctgtatctgcaaaggatttacaccgtagttcttgatcaggatacgtacgacggaggtagcacgaatcacgctcaaatcccagttgtctttgaactgtacggtgttgatcggtttattgtcggtgtgaccttcgataaatacgtcgatgtcggtctgcttgttcaggacttccgccaatttgccgagagcttcctctccgcgtttatccagacgggcgcttcctgactggaacagcaatttgtccgacattgccacatacacctttccatccttttcacgaaccgtcagttcgtctgtgctaaagcccagtaacgcgtctttcacactgttcagcagttgtttcactttctcgttctgagcgttgatcatgtcctgcaactcgttgatggtgcgttctctttcgctaagttcgtttttcttctgactcaacaaggcattcagtttttcctgttccgtcatgttagtactaagcatgctctgatactgacggatactgtttcccatctgggtggtatcacgcaggagcttcttgatttgtgctgacagctggtcgcccgtgttgcggcaatcagtcaataaactttgcaagctgtcgatacttgcaatacgtgcggcttctgtcatcatgaacttctttttcgttacacatgaagtacataataacaatgtaaggaaagtaaataatgtaattttcttcattacgctttattttttttgcaaagaaataattttcttctgaagattacaaaaattcttttattaaactctgtgtcatatagttaagaaatggcctgagagaattttactgctggcacttcgttgatgtcaagacaggctgttgtgcggaatatgctaaagaatcagcgttgcagaaactcgcaaagtttctgtacagccagtgcacgatggctgatcttgttctttatttcgtttcccagttcggcaaaagtctgttcgtacccttcgggcttgaatatcgggtcataaccgaagccggaatctccgcgcttctctttgatgatttcccctttgatcacaccttcaaagagatattcctttccgtcgagaatcagcgaaatggcagtgcggaattgcgctttccggttctcttttccttccagttcgtggagcagcttgcgcatattcgcctgagcgtcgtgtccttcgccttcggcatagcgggcggagtacactccgggcgctccgttcagagcttccacttccagtccggtgtcatcggcaaagcagtccagctgatagttccggtagataaaagaagatttcagcaaggcatttccttccagcgtttcggctgtttcggggatgtccgtgtggcagtcaatatcattcagactgagcagttctaccttatccccgaggatggcagctacttcttcgagtttatgagcattgttggtggcaaatacaagtttgcgtttcattgtcttattcttgttttttagcggaattatccggattcattcacctgtttatttcactttcaactgatcgaacccttcgccatacaccccgatgacggaactttgcgagatgaaagcgttcggatcgatacgttttaccagtcggaagatatccagcgactgacgccttttggccagtacgaccaatacttttacatcgtttttgctgtaccatccggtaccgttgagcacggtcaccccacggtctgtatctttaatgatgcgatcggctatctcatcatacttcttggagaagatgaagaactgtacggactgacgggcactgttgataatccagtcgagcacgacaccaatgatgaacagagtgacgaaaccgaagattacccgacgccagtcgtgaaacacaaagtaacaggaactgatgatgaacacatcacaaatcatgatcatccttccaagtgatacgtctttgtatttgttgacaatagcagcgatgatgtccgttcctccggtactgccgttataattgaaagtaatgcccagacctacaccacacatagccgcaccgatgatacaagccataaagtcctgtccgctgccgagcagcagaggctttccgtcggccgacatatcgggcgtttgtatgtagttgtttaccaacacctggaatatccatagcaggaaagtcagcatgaaaattgcataagtagtctttatgctgaatcgcggacctaatatcttgatggcaaatgtcatcagaaccgcattgatgatgaagtacgaccactggataggaaatcccgttgcgtaataaatgatagccccgataccggtagtaccccctgtcgttatctggtaaggcagcagaaatgccgcccatcccaaagcataactgatcaatccgagagtgatgtagatataatccttcacttctctcattatttccgcttttgctggtttgcgcatttaattaataggtaataagtattaagtaataggtaataagtcgtagtcgataggtacaggtaataagtattaagtattaggtattaaccttgcggatatgctcggaaagcagctacggttattacctattacttattacctgttacttattttaaactaccacatttacaatcttcttcggcaccacgatgatcttcttcggtgttttgccttcgatccacttctgcgaacgttcgtcggctaatacggcagcctggatggcatccgaagcggcatcagcgtcaaactccatgttgaagcgtgcttttccgttgaaggagatggtatagttgatcgtatcttctttcagatattcttcgttgtatgcgggccatgcggcgtcacatacggaagtttcgtgtcccagtgtatcccacagttcttcgcaaacgtgcggagcgaaaggagcgagggtgataacgagctgttccagtatctctttcttgttgcatttcaagttggagagttcgttgacacagatcatgaatgcgctgacagacgtattgtaagagaactgttcgatatctcccgttactttcttgatcagtttgtgcaggctcttcaactcttccttcgttgcaggctcgtctttcaccagatattcgtcggtacggctgtaaaacaatgaccaaaacttacggataaagcggtgtacaccgtcgataccgttcgtatcccaaggcttggactgctcaaccggaccgaggaacatttcgtacatacgaagggtgtctgcaccgtatttttccacaatcatatccggattgactacgttgaacattgatttactcatcttctcaaccgcccatccgcagatgtattttccgtcttcgaggataaactctgcttccgcatattcgggacgccatgccttgaatgcttccaggtcgaggatatcattggatacgatgtttacatccacatgaagtggagtcacttcgtattggtctttcaggttcagtgaaacgaaggtgtgagtatctttgatgcgatatacaaagttgctgcggccttgaatcatgccttggtttactaacttctggaacggttcttctactaccgatgcacctacatcgtgcaggaacttattccagaaacgggagtagatcaagtgtccggtagcgtgttccgttcctcctacataaaggtctacgtttttccagtattcgtccactttcgggtccaccaatgctttgttgttgtgcgggtccatgtagcgcagatagtatgcggaagaaccggcgaatcccggcatggtgttcagttccagcgggaagatggtaacgttgtcgatcttttcgttttctaccgtgcacttgtttaccgtgtcccacgcccattccttggcgtgtcccaatggaggttcgcctgtttcggtggggaggaacttgtctacttccggaagttccagcggcagacagtcttcgtcgatcatgtacggcattccgtctttgtagtatacagggaacggttccccccagtagcgctggcgtgagaaaatggcgtcgcgaagacggtagttcactttcacacgtcccagattatgttctttcacatattgcttggtcttttcgatggcttccttgatggtcagtccgttcagagacaggtcacagtacggagttacatccggacgcggagagttgcagacgataccttccttggcatcgaagctttcttcgcttacgtcacaaccttctaccaacgggcggatttcgagtccgaaatgcttggcgaaagcatagtcgcggctatcgtgggcgggtacggccatgatggctcctgttccgtatcctgccaatacgtaatcgctgatccagatgggcactgcttcacctgtaaacggattgatagcatacgaaccgctgaaaacaccggtcacgctgcggtcggcgatgcgttcgcgttccgtacgtttcttggtgcggtcaaggtaggcgtctacttctgctttctgggcgggagtggtcagctgggctaccagatcactttccggagccagaaccatgaaggtcacaccgaacatggtatctgcacgggtagtaaagatggtaaattcgagatcgctgtcttttaccttgaactgtacttcggcaccttcggagcgtccgatccagttcttttgagtttctttcagtgattcggtccagtcgatggtatccagtccgtcgagcagacgctgagcgtaagcggatacacgcagacaccactggcgcatcttcttctggactacggggaagccgccgcgttcgctaacgccgtctatgacttcgtcatttgccaatacggttcccagtgcctggcaccagttcaccatcgtttcgccgaggtaggcgatgcggtagttcatcaggatttcctgctgttccttttcgcttttggctttccattcttcggcggtaaagctgatttcttcgctgcaagcggcgttgagtccttggtttccgtagattgcgaatgcgtcgatcagttcctggatagggcgtgcctgctgttcgtcgttgcagtagtagctgttgaacatcttttggaaagcccattgggtccagtgataatattcgggttcgcacgtacggatttcacggctccagtcgaaagagaagcctattttgtcgagttgctcgcgatagcggtcgatattagctttagtagtaattgcgggatgctgtccggtctgaatagcgtattgttccgctggcaaaccatatgcgtcatatcccatcggattgagtacattgaagccacgcagtcgtttgtaacgggcgtaaatatccgaagcgatgtatcccagcggatgccctacgtgcagtccggcccctgacgggtaagggaacatattcaatacatagaatttctgcttcgattcgtcttccgtaacctggtaggttttctcttccacccacctttgctgccacttcttttcaatctccctgaaattgtactccatagtgataaagtttttatttatagtgatttatactgttatttcaatttgagccagcaaatttacgtgtttattttcagataaccacgtagtgagtgaaaaaaacctttcttttataataaggtattgcccgaataacaaggtaatacctgataaatgaagaaatatcacggcaaataccgtccggctattgactttcttgtttttatttcgtatatttggaggaatataaaacggaatagtaatgataggatatataaaaattataacataagttcgataggtggatgtgcagaattgcatagccaggataacgaatgggcaagaaactgcgaaggttcttgcccgtttttgttataataattctattgaggccgctggaaacgcctaaaaatagtttataataaacttggggaccgtttataataaactctctcgttatttattaaaaacgatgaaggagtttattcgattccgggggtgtagtgtaagaaagggagaaaactttttttgagtaaagttctcttcctttctttatgtggtaaaaatatgatatattaataggactgttttgatagtggtgatttgtttacaaacgagcgcttctatctgtaagaatctctttttcgttagacttttggataatatgtttctttcatttggtattattatatacgtattaatgtgagtatattttgggaggattgtttgatcgttttataatacaaagaatatggataaaatgtgagtgtatactggttatagttgaagtcctgtcgggataatctttttagagtgttagctgaaaaagcctttaaataaacgttaaactagcctggataccgactaaaaagtattttttccaacctatatcctttattttctcctcgaattaattgcaaattaattactaaattaactagcgggacttacatttgtgccagttatcataaaattctaataaatgaaaaagttgctggtactattaacaatgcttcttacatccttctttgctgaagcgcaaaaaagcagagactattggaataacaagctaaagtttatctcattccgactacctcctccagtaggatatattccgaagattggtcaatcctgttgtaactaaccgaataaataaattaaatatatatgaaatatcttatcagctttttattcttagctcttgcattttcaatgaaaagtgaggctaaagtgacattaccttccatactcggagataatatggtattacagcagcaagcagaagtcaaactatggggaaaagcccgtcccaatgctactgtaacggtgaagacttcgtggaacgggcagacatataaattctcatcggatggcaagggaggctggtcgttaacagtatctacccctgttgcgggaggcccttacaagatcatcttcaatgacggcgaattactgacgttgcagaatgtactgatcggtgaagtctggttctgttcggggcaatcgaatatggagatgccgatgggctgtttcgaccggcaaccggtcagaggggcgaacgacattattgccaaagccaaaccatccacgcctatccgaatgtatactacagattcaaaggatgggagatgggtacgccagtttagtaaaacgcctgcggaggactgccagggcgaatggctggaaaatacgccggtaaacgtttcccatatcagcgccgtgtcttattattttgcgcgttatatacaggaagtgctggaagttccggtcggcatcgtcgtttctacgtggggaggatcaagaatagaggcatggatgagcagagaatccataaagccttttagtagcattgatctttccatcctcgataacgatgctgaagtgaagaatcctaccgccactccgtgtgtactctacaatggcaagatagctcctttgactaattttgcagtgagaggcttcttgtggtatcagggcgaaagcaaccgtgacaatgccgatctttaccagagccttatgcctgcctttgtggctgacttgcgtgcgaaatggggcaggggcgaacttcctttctactttgtgcagatagcgcctttcgattacgaaggagccgacggtacatcggctgcccgcctgcgtgaggtccagttgcagaatatgaaggatataccaaatagcggcatggttacgacgatggatgtcggccaccctgttttcatccatcccgtagacaaggagacggtagggaaccgactggcgtattgggcattggcgcagacctacggcatgaaaggattcggatacgctccccctgtttataaatcgatggagatacaggagaataaaatctatataaacttctacaatgcccaacgcggcctaagtccgatgtggacatctcttaaaggatttgagattgcgggcgaggataaagtattctatccggcttttgccgaaatagaaaccacgactgcccgactggcggtttcgagtgacaaagtctctcatcccgttgccgtgcggtatgcgtataagaattatgtggaagcaagtattttcagtattcatggcatccccgcggcacccttccggacggataactggtaaaagcagacgattacctgaatagatacagctattttatcagacatccggatattcgctttcttgttatatccggatgtataaccggttctctttcggcgaaattttgttgaaaatatatctatcaaagtcagtgggtatatccatgaatccctgtatctttgcattctcattaaaaccataattatggaactaaagcatgggtactatcatctgattgccatactaacagtagctatctggggactgacattcatttcgactaaagtattgataaaccacgggctgacacctcaggaaatcttcttttaccgttttctgattgcataccttggcatctgggtaatttctcccaaacgtctgttcaccaataactggcaagatgaactgtggctggtagcaggcggtatattcggtggctccctttatttctttacagagaataccgctttaggcatcacccaggcgtcgaatgtatcgtttatcatctgcacggctcccttgctgactactatcctttccctacttttctataaaagtgaaaaggcatcgaaaggactgatatacggttccctgctggcattgatgggggtagggctgattgtctttaacggcagttttgtgctcaaaatatctccgataggcgatctgctgaccttgcttgccgcattatcatgggcattctatagtctgattattaaaaagatggccaggcgttatcctaccgtatttatcacccgcaagattttcttttacggagtgctgacgattctgcctgccttcctcctgcatcccctacagcccgataccgccgtacttcttcaacctgccgttctgttcaaccttctgtttctggccgtattggcttcgctgatctgctatgtactttggaatgtggtgttaaaacagttgggaacggtacgggcatccaattatatttatctcaatcctctggtcacgatgattgcatcgttccttattctggatgagaagattacgttagtcgctttaggcggcgcagcttgtattgtctgcggggtatattgggctgaaaagaaatagaatagattatgagaaaaatgatgaatgagcagcttcctatatcgaagtcgtctcctttgaaagctcgtttttatgattatccttattttacttacccttggcatttccatacggagtatgagattatctatgtcaaggagggcacgggaatgcgttttgtaggaaataacgcggagaaatatgccgatggtgatattcttctgctaggctccgatttgcctcattatatgaagagcgatgaggtgtatcggcaagaaggcagtacgcttcggacaacagggactatcattcagtttgaaaaggacttcatgcaccacgctttcaattattatccccattttgtgaagataaagaacctgcttgaagaggcgcaacggggaatttactttcccgcaggatgctccctgcggctggttgatttacttgaatcgattccggtggagacaggagtcgatcagatcacttctttcctgcaacttctgaaagaaatggcaaacgtcgcttcacggtctgtgctatcgacttccgacttcgaaaatgatattatctacgacggctcgagaatagacaaaatcatagcttacctgaataagaactatacacggcagattgatctgaatgaaatatcttctctggcagctatgaatcctgctgcattctgccgcttctttaagagcaaaacggggaaatcattcaagaattacatattggagatgcggataggatatgcgtgtaaactcttgctcatgggcgatatgaatatttcgcagatcagtgtggagtgtggatttgatacgatttctcattttaataagtcgttcaagaagcataccggattcactccgtcttactataaaaagatgatgctggctgaatagaaatgaatgaaagaaagaggcaaacgggacgtatggacataaaaaaagggtcaacgccttgacccaacctttgttaaccttaaatctaatactatgaaaaacacattgcaaagatacggactattgggaaattagcaaattatccaagtaaaatagtatgttttataacacgttttaatagttttcctttacttgttaagaaatatacccttcttttttaaaaggatgcaacactaattgtgaaaattgaaacgggaaattccgttgattctctgccggaaaactgttatctttgcaaggttaatctcattattcactcaacaaaaaagaaaaggagcgaaccgtgaacgaggaagaaatcgtgcttacccccatgatgaaacagtttctggatttgaaagccaaacatccggatgcagtgatgctgtttcgttgcggtgacttttatgaaacatattctaccgatgccattgttgcatccgaaatcttaggaatcacactgacaaaacgcgccaatggaaaaggaaagactatcgagatggcaggatttccccatcatgcgcttgatacatatcttccgaaactgattcgtgccggaaagcgtgtagctatctgtgaccagctggaagacccgaaactgacgaagaaactggtgaaaagaggtattaccgagttggttacccccggtgtatctatcaatgataacgttctgaattataaggagaataatttcctggctgccgtccatttcggaaaggcttcctgtggagttgcctttcttgatatatctaccggtgagttcctcaccgccgaaggtccctttgactatgtagacaaattgctgaataacttcggaccgaaagagattcttttcgaacggggcaaacgcctgatgtttgaaggtaacttcggcagcaagttcttcacattcgaactggacgactgggtatttaccgaatccactgcccgtgagaaactactgaaacactttgagacaaagaatctgaaaggattcggggtggagcacctgaagaatggtatcattgcttccggtgctatcctgcaatacctgacgatgacacagcatacgcagatcggtcacattacttcccttgcccgtatcgaggaggataagtatgtgcgtctggataagtttacggtccgcagcctggagctgatcggcagcatgaatgacggcggcagcagtttgctgaatgtgatcgaccgtaccatcagtccgatgggagcccgcctgctgaaacgctggatggttttcccgttgaaagatgagaagccgattaatgaccgtctgaatgtggtggaatacttcttccgccagccggattttaaagagctgatcgaggagcagttgcatctgataggagacttggaacgtatcatttccaaagtagccgtaggacgtgtgtcgccacgtgaggtggtgcagttgaaagttgccttgcaggctattgaaccgatcaagcaggcttgtcttgaagcggataacgcaagtttgaaccggataggcgaacagctgaatctttgtatttctattcgcgaccggattgccaaagagatcaataatgatcctcctttattgatcaataaagggggcgtgattaaagatggtgtgaatgaggaactggacgaattacgccgtatttcatactccggcaaagactatctgttgcagatacagcagcgtgaaagtgagcagacaggtattccgagtctgaaggtagcttacaataatgtattcggttattatattgaagttcgtaatatacataaggataaagttccgcaggaatggattcgcaagcagacactggtcaatgcggaacgttatattacgcaggaactgaaggtttacgaagaaaagattctgggagccgaagataagattctcgtgttggagactcagttatataccgatttggtgcaggcattgacggagtttattccgcagatacagattaatgcgaatcagattgcccgtctggactgtctgttgtctttcgctaatgtggcgcgtgagaataattatatccgtccggttattgaggacaatgatgtactggatatccgtcagggacgtcaccctgtgattgaaaagcagcttccgattggtgagaagtatattgccaatgacgtgatgttggacagcgcgtcacagcagattatcatcatcaccggtcccaatatggccggtaagtccgcgctcttgcgtcagacggcactgattacgctgttggcgcaaatcggttcgtttgttcctgcggagagtgcccatatcggtctggtggataagattttcacccgtgtaggtgccagcgataatatctcggtgggcgaatctacttttatggtggaaatgaatgaggctgcggatattctgaataatgtctcttccagaagtctggtgttatttgatgagttgggacgtggtacgtccacctatgacggtatttccattgcctgggcaatcgtcgagtatatccacgaacatccgaaagcgaaagcccgtacactgtttgctacgcattaccatgagttgaacgagatggagaaatccttcaaacgtatcaagaactataacgtgtctgtgaaggaagtggacaataaagtgatttttctccgtaagctggagcgtgggggaagcgaacactccttcggtattcatgtagcaaagatggcaggtatgccgaagagtattgtgaagcgtgcaaatactatattgaagcaactggaatcggacaaccgccagcaaggtatttccggcaaaccattgacggaagtcagtgaaaacagaagcggtatgcagctcagcttcttccagttggacgacccgatcctttgccagattcgggatgagatactgaatctggatgtgaataaccttactccgattgaggcgttgaataagctgaacgatataaagaagatagtcagaggcaaataaaaactgatataacttatgcgggggctgactaaaaagtcgttagtatctccattctcctccttccggaagctaccctttatacacaagtcttagctgattaactcatacagttcaaactgtgtattaaatctatccagtccattcttaaaggttatatatcctggaatggactggctcttgtatgcactccatgctcctaaccttgcaataatccatgctgcccatgccattgattcttttttatatggattttgctgtattttggtatttccctcactcttttttcctactatatgtaataatgctatttctttgcttgtaaagtagatttctgaagagagtttttcatcttctttatcaaaagaaagtttgagtaccatcacctgcagggctgcctgcaaggaaattaagattagtttttgtaatgccgaaactgtttccaactgtgcgtcctcaatcatgaatccctttcttttgagcactctgaacaactcttcaatcagccatctacaacgataccaaccgatacattcaattgcttgttctacagtctccaccacatgtgtagttagcagtctccattcaatagggctctcatttaccggtgtactggaagatttttctttaacatgtatgcaataaagactaacagggggactgccctttgccggaccgttaacaggagcgcacaaggtgactctttcaaagcgaagttccatgcacgctacccgtttcttacgtccgcttcccgggagcacttcaaagctatactctgcccgtagaacagcctgctccattaatgtattcagatggacagaacagtctggatcatccaaccggcaattcctttcatgaacagaacgtatcagcaagtgaacattatcagtagggatacggctgaaaagctcgaaaatgtccgcttcacggtcaccgatgatcgttttaactgcatcccggggcatttgctcactggcagccattccactttctatccaacgatatgactctttttcttctataggctgatatctgtaattacgttcttcacgacttaaagcagccggtgagcgattccactgcttaaccgaagaaaagcctataggaatatgactggaggcatccactaccaagacaggatgcaaaaaagtaccacattgcttttgaccgacaatgccgggactggctgtttttttcttcattcgctcaacatgagcctcatagtttatctccgaggtatcttgaatacacagtaaatgcttacgaccggaagcattcttacagcaagtgtgtatcagacctgataagatagcatcagagctgactgaggaattgttcaaaaatctataagcacccatcttttctttatgttccttactaaattgattcactatagcactttgatggacaaccatctgagagcaaattaagtttaaacgccgcaaaagccgaggatcacgaatttgatctgtctctaataacatcaagcaaagataaaaaaaataatatatacttgtgtataaagggtagcttccggaaggaggagaatggagatactaacgactttttagtcagccccaacgaagatactatagacttcttatgttgtaagttatagggttacttgccgtgccaatggtatggccttatgcttataccttctttgtatagaaagagaggccggttggcttccatgtgcctttgtttccgtaggtatccttttcttccgtggtataggcaaagttttttccgtctgatatttcgtagatacagtttaagtcatcgctcttcttttcatagacataccctatgattgttccgtctccgttcggtgccggttctaatgtcaaacggtgattctttccgtcggaagacaggtaaagcggtactgtacccggttcgtgtctgacaaatacgcttcctatcacaccttgacagatatcggcctttgcggttaactccttataagaggtatagtagcggtgatagtgcccgtcacttgcctgaaagatgggagccgtttgttgtaaggacagttggtgccttttgatatgggctattaccgcttcttttatttgctgtttctttatggggtcggctattacctcatagatggggataaggtcttcaccggtcagagtagttaaggcgcgattcttttcattggcagattgtatccaggggctgatatccatcggatcgcctgtcagctgatcaaagactttgtaatcagctccttgcaatgacactacaattgttcccccatagttcttttttactgtttcttcgggataagtgatggaaacattgggatgcttaataatgctgctctgatgtgcgcccatccctgtatttgcggttctcaataagttctcttcatcatccgctacgatgctgcgatagagggttttgcttatataacctaaatgagtgttcaccaatatatgagtaccaaatagctctatgattgtttcaggtgacgcatcttccagctcttgccggaaatcatcggtcagccagttggaccaatccgcattcagagtgagtaatctttgaatcactccgttagctcctgaactactaaatgcaaatgtgtattgggatgaataatcataaggtttctgaaaatatttatgaccggtaatggtagcggtgaacagcaaatcatctttgttttctgccggcaccacaaatttcttatattctgtgattgaccgaagaaactctttcatatcacgaccaatgaagctgtctcctaccccgctcgaacctaccagattgctaatcttttcattatctatcttgctcagatcgagcactggttcttttaccgaattattgtctatgtagctgcccataatatcatatccggcacccagaaaaggctgtgtaagtgacatggaggcttcaggccagctattaccttgtggtacggcagggcttatgtaactgtcattcgtttccttcggaggagtgtaaggtaattcttctttgtcactgcaacttgcgaatacggatgtgacgaaagatacccatagtagtttgaatagtgtttttgtgctcatatttttatcatttagtcgcgctaaaggtagataaaaggaatgagaaaatacgatttgaacagcactattatttcagaaactcttctaccttcttataaaacaaggaaagatgatgcccgtcaataaatccgtgatgaatcgtcatcgcgataggcatcaccagtttgccttcccttatgatggcttttccggcattcagcaacgggtagttattgccgcttctcttctcctgtgtgccggtgatggaagtaaaatacaggtcgggagtcgcacttaacagaatcagtccgtaatctccgtcggctacttctccgttttctgctgcatacggatcaccgtcttcggggatggcgtcgataattagccttgcttcctgatagaaagtgtcgaaatcgttgtagtaagggaaacgggtggtgaagaacttgccgttctcttttatcttgatgggagacagcatatctatggtgtcatagagcactacacgtccgtccggatcgatgcggtaacgaaactccggtatttcgttggctgcacgcagcacagcataaagataatggagaaagaaagactgtccggcggctttggcacgttgcctggctcctccgcactctacttcggaggtaatggataattggggattctggaagtggcggaagaagttgaaattctccttccgctcccagttttctatatctatgatttgtttcatttctttgctaccttcttccggtcatagaagaacatgaagtagaaaccgatgatgatgaaaggaacgctcagccattgtcccatgttgaacatcatgttgtcttcgaatgcttcctggttctgcttcacaaattcgataaagaaacggaaggtaaagatataagccagacagagtccgaagaagaagccgcgatgcagtttcttgctgtaattcttataaagatagatcatgatgaagaacaggatcagataagctatcgcttcatagagctgtcccggatgacggggaagcatatctacccgttcgaatacgaacgcccagggtacatcggtcgggttaccgataatttcggagttcatcagattcgccagacggatgaagcaggcggtgatcggagtagcgacggcaatcatgtccaccacatccatataatgaagtttcgtcttgcggcaatacagccaaagggcgatcatcaatccgagtgtacctccgtgactggcaagtccttcataaccggtgaatttccatccgccgcctgccaggaacttgatcggcagaagcatttccacaaatccctttccgctggtcaggtactgtcccggatcgtagaacaggcagtgccccagacgtgctccaatcagaataccgaagaaacaataaaagaagaggggatcgaatttcttctcgtctatttttttgtcgcgaaactggtaatggacaatgatgtaagcaaagaagattcctactgcccacaataatccgtagtaacggatagaaatgccgaacaggttgaatagttcgggattcggattccagttgattgataataaaagggtattcatgttggataacggtttacggtttgtaattagtgttttgtgaatttttcggcaaccatccggtaagttggtatgtcgataccttgctcctcggctgctgcaatcatgtcaaacagcaaaccttgtatttccgattcatgtccccgtgccaagtccttttgcatggatgcggtactgtcgggatcgagtttatcaatgactttcaaattgtagctgacggggtcttcgggaaattccactcccaacttacgtcccagtgcggcactctcagtagaaaggccgatgaacgtatcacgtactttccccggcttctgaacttcacccatcggcacgtcatagtaagcaccggtgacggccattgccgagatgaacgaccatttgacgaatgtatcccgattgatgtccggagaaatctctgctttgattccactttcctgaaggtctttctgaatggcttccataatgcccggagccacctgtgtccctttgtgggcgccatacaccagacggaagattttccccatctgagtgatctctcccgtgccggaaacaaagcctacgatgtagatgcaaccatcgagcaccgttacacccggaacgagacgctgaatgcgtggtcctgtcccgtaaacattcaggatagggatgacgactgtcttctcatgcgatgctcttttgatgagttcggtaatcgaatcgacggaatatcctttcacgcagacgaagatcacatccgctttcccgttaaattcctccgcattcatggtagggataaccagcgtatgctctccctttaaatctgatttcagtttcagaccgtctttctgtatagcctgcagatgagctccgcgggcaatacaagtaacatcttttccggctagcgacaagaatcctgcgatactgccaccgacgcctccggttcctgcaataagatatttcatactgtttgagtttaaacgttgaatcggaagtgcatgatgtcgccgtcctgcaccacatattcttttccttccacaccgagttttccggcttccttgacagccgcttcggagccgtactggatataatcatcgtatttgattacttccgcgcggataaatcctttctcgaaatcggtatggatgacgcctgcgcattgcggagctttccatcctttctcgtaagtccatgcacgtacttcctgtacaccggctgtgaagtaagtttcgaggttcagcagcttgtaagctgacttgataagacgtgcgacgcccgattcttccagccctacttcggcaaggaacatctgacggtcttcgtatgtttccagttcggcgatgtctgcttcggtttttgcggcgacaacgaggatttctgcgttttcgtctttcacggcttcacgcaccatgtctacgtatttgttgccgtttaccgcacttgcttcgtctacgttgcagacgtacatcacgggtttgctggtcaacaggaagagttcgtgagcgatcttttgttcgtctttcgtttcgaaagtgacggtgcgggcggatttgccttgttccagtgcatccttgtattgaatgagtacgtcataagcctgctttgcagccttgtcgccaccggtctgagcctgtttctgtactttctggatacggctttcgatggtttccaggtctttcagctgaagttcgtagtcgatgatttctttgtcacggacggggtttacgcttccgtctacgtgggtcacgttatcatcgtcgaagcagcggagtacatggatgattgcgtctgtttcgcggatattggcaaggaatttgtttcccagtccttcgcctttgcttgcacctttcaccagtccggcgatgtctacgatttctacagtcgtggggacaatccgttggggatgtaccagttctgccagtgcgttcaggcgttcgtcgggaacggtgattacgcctacattcggttcgattgtacagaaggggaagtttgccgcttgcgcttttgcgtttgacaaacagttgaaaagtgtcgatttacctacgttcggaagtccgacaataccacattgcaatgccatattaatctattatttcttttattatcaatgaatcatatcatgtgagcagcgacttggcgctaatctcccgataaaaacagttttgattgccagcctgctcattttagtttgcaaagataatcattttttgagctaatgagggaaacttggtgcactttctgtctttttctgataattgtgctggctggaaaaaggttttgagcaaattgacaaaatgaatttttagtctcttcagaatgccgttttcctgcccgacggcgggagtgggggaaaatatgcgaatgaaaatctgtattttgttcataaatagggcggtatctgaatctttacaaggctaataattgggcaaccatgcccttcttgtcaaatatgaaggcttgatgctttggataaggttgactgacacgttggatatatatgaccaacacgttggataaggttagctgacatatcagctattaatgttctgtaggttggatatatatattctgcgtgtcaagtaacgactcctttgcataatcttccaataaaacggaaatgatatgcaaatagtctgcatattgatacatcctattctttctctgagagctgactggcgttcttttcaaaatgtatctgtcagcagaaacggcaatatggtgccattaatactttgaattgattttattctgtcactatgataatttcatctttagtgagttcttaaaaaatccccttattctctggctttactttctatttgagagtaattaagaataagggggatttcagtattcgttattcgcaaggcggtacttccgaaatactgccataccggtgatactcaaaggcgatgctttgctccttgatatagtgtatcagctcgatgcgcccttgcttcacaggcggtgctgtcgcaatgtatttattggtttccgctgcccgttcgtatatgacatcgggtatatccggcgaacaggtacgtactctttcatattcgggcaattctttcaggaagtcctctaatgattctttccggagtgtgcagccgagtccggcaagtctgctgctacgatcatctgtcgggccaaaactgatggtgagcggagttctgcatatacgggcggcgtgtgcaatcatcgtcgcttcttcgtctgtatctttcgggaagaggcgtagaatcatgttcttcaaaggcagatagcggaagaggttttgttctccatatagccggttgacgtctctcggttttgagaactcttcctgataggctttggcataactctgtcggtagtcggtccggctgtccggtttgtcggtgatttcgaggaaacaggtacagtagttggggccacctgctttgataccaccaccgaaggcggatagtttcattcctccgaatggttgccggttgacgatggctccggtaattccccggttgatatacaggtttcctgccattacggagttcttccacagcttctgctccttttcatccagactttgcaggccggaggtcaatccgtaatccaacccgttcaccagcctgattccttcttcaaggttctcgatacaggccacgctcagcaggggaccgaacaattcggtgcggaatgagaaactttccggttttactccccatttgacagttggtgcaaggatgtactctctgcggtcgatgaaacgcgggggaaccagccatgactcacccggttcgaggttgaaggcttgcagtaacttatcgttcttgttggtaatcatcggaccgacgatatttccggcattccacacactgccggttttcaggcttgtcgccgcatctttcagcttgctacggaagttttcgtcttcgtatacggaacgttcgactaacaacagcgaacaggcggaacacttctgtccggcattgccgaaggcagaagtgacgatgttcatgatggcgtggtcacggtcgcccgacgctgtgaggataataacgtttttacctcccgtttctgccgataacggagtggtcggattggcttttgcgatattctgtgcggtgtccgttcctcctgtcagaatgatatgtttgatggcgggggcggtagtcagtactttcagtgcttcccggcgggtgatgatgacttgcagcgcttccttcggcacaccggcatcccagaatgccttggcaaacatccacgcaacaggggcggctacggtggcaggtttcagtataacggtatttcctcccgccagtccggctactatgccgcccacagggatggcacaggggaagttccacggggagatgaccagtatggtgcctttcggtttcatttctacgtcatccagcgcggcaaacttcttcatcgctgtcgtatagaaacgggcatagtctaccgcttccgatacttctacatcaccttcaatgacggttttacccgtcacggcacacatacagcctatcagatcgccccgcatatcggcgagccggttggctgcttcgtacatgatccggtggcgttcttcgagtgtggtctttctccatccggcagggtctgcctctgcaatttcgatgattttctccacttgtgcgctgtccgcctgcgacatttcacagatacagacttcatcgtcctgacaacggtctgtatatgggtagcggctttcgcataccaccgtttccgcacctatttgcagcggaatgatttccggctgttccgttccgtctttcttccatttggagaagatagaacgcacccattcctgattctgtggcaggtcgaagtccgtgtccggttcattcttcaggacgtctgccggtgggacgggcgtgtaaggaagattgcgattctgtgtgcgtggggacacatgactcagttgatctttcatggcgtaggcatcttcgaactgcttagccaggaaatcccactcttttgtgttcggtctcagattgaaagagtgagtcaggaagttatcaggtgccgtattctcatccatccggcggacgagatatgagacggcattcagaaaatgttcgtttttcactacgggagtataaagaatcacccggttgccgagcatggattgggctctccataggtggttcgccatcccttccagcatttcgaaggtcatgtattcggctgtaccatatttctgagccagcagataggcgtaggcgatggagaacaggttatgggaagctactccaagatgcaatacccttgcgttttcgggcatcagtgcccgttccagcagatgcaggtagttggcgtctacttcttctttggaagggcggatcggattgggccagcctctcagcgaagagatgacggtttccatttccaggttgcagcctttcaccagacgcatcttgatcggagcaccgccttctgccacacgtgctttggcaaattcgatcagttcggtctgaaagtcgtatgcgtccggcagatatgcctgaacgacgattccggcggaatagttcttgaactgcggcaggctgagcactgtcttgaagaggcgtaatgtgaaatgggtatctttgtactcctccatatccagattgataaacttggatcgtctgactccttcttcgtccgtataggggaaatcaatcgctttctgataaagcgcggacattcgcgaaatgagttccggaaaactttcttcataattcaaggcgtgtgtctgcgcatagattcccgatattttcactgatatgtagttgatgtcgggtgattcgagcgctttcagataatggtggtaacgatggtcggcttctccgttgccgagcaccacttcgcccagcaggttgacgttctgcccgattttctcctttgcacggatggccagatgcttcgtgagttgcggacgcgcttcgttgatgatgacctgcgaggtgttcatgcgcaggcgcttcttgatgatggggatggcgataaagtcgaaatgatggccgaatgcctgatacattttgaacaggaagctgtcccgcttgttcagaaattcgggaacgccgtattggtcgagaagggttttgatacgtttggcaagtatccttcggtcacggatttgcgaagattcatccagcatcttcacgaggaatttcttgtcctgcggacgttgtaccatgacagcgtatttatgctgttcgcggcgttcggcttctgtgatggtttgttcacaggtattgtacagtttgagtacccaatcctgtacttcggtaagggtcggttgatattgtttgtccatactaatctgatctatgtagattatggaaattaagaaaataagaatctcaaatgcaatttacatagggtggcaggtgggactgaacataacagcacggtagcgatgcagggtttgcaacgcttgctgcgagaagcggtcgaacagatactgttgtgtcatattcgtcgttttttaaagtgattaggtacaaaaggctcacacttctcgcaaatataaaaatatcttgttgattttcaagcaaaaggagagaaaatattctctcctttcagaattattttttcttgcaataactacccgattgctttatagctattactgattcgcattatctatccttacttaaaagaataaagttgcaaaacaacttgcgggctacatcagccgcagccgcaggattattcaggttatcaaccaaatctaaggttgaataatagattttcccttttccgcaagagatgattccgacagcagagccaagattaaacggagcactgccgtatgagcctgccactaattcttcattatctatatgtagccctaaacgccggtcgccgttacgcaccagggcttgataaggccatcccattgctacattgaccggaagaccgttgaaaagaggatgttctttcacgaaatgaacgccgcctacccagttctttcctacggaataatagccatgataagccgaacctgtatatgcgctcacagcatccatccatgactcggccgattttaacaagagcaatgaagtaccgtcttcctttacgcgatccaataactcttggggagcaatcgccgcatggtccggaagagaccagactaattgtacgcttcccgtgggattgcgttgactgtattccacacggacagcgacctcatcacctgctttcaacaagaaagggcgaacgacggtcaattctttattatttctccattcatcaacaatacgctgtccgttgacggaaagacgcattccctgatcggaagtaaccccaatcatataggtgccggactgaggggcttttaatttcccatcccagatagctgaaaaagattggttggcaggaagcaaggggtccggttgggcaccgtctgcgaaagtacggtctatcttgttgtcttgggtcacccccgccaatgtacgtaagtcatcgtctttataaagagagagttccaaaaccgatttgccttctttctgacaaaatgcttcaacaggaacaggctgcggcgcatccagggatgaacgtgtcactacaatccagtccagtttctctatatccgaatggaaagcaggaagctcgcatccggttgctttctggtaaaaggtagcaacaggatcatcgggagtaccatataaagcaccttttcctttcaattgcttcttatcccagtaaatgccaagtacttcatctttcccttcggcgcacaggtgtcccgacgcattccgtaattgcgccttgacttgatataaaccggaaactccttctatttccaactggcagtgctccaataatagctgtccgaaacagtctcctccggtaatgtgcacctctttttcgatgtgttttccttccttcccgtcgggtgtgcagacaaatactgataaacggtattttccggaaagatttttttcattaacgatgtagaaatcgaccggtacttttcccggcaggtgtacaaactgtgtgcggggagagaccgctacatagagcggttgggtatagtaagtaaaggtggaaggatttcctttgcagttccggtagatgtctacaatgccggaatggttgtcatacggcatcgcttcccagccgttcactgcataaacgtctcctgtattctgcatacgcattccttgaatgcgccgtccttgatggtcgaaagagacatctcccatggcgcgtgtcagcgagtcaatggagccgaagtaaggtgccaggttcttctcatggaaaaactgctgaaatgcctcatattgattcttccagaataatccgtcccaccccttgattccggtctgttctatttctttggcaatttcggcaatgcggggaggagttgaaagagcgccttcttcgccccgtatatagatttcggtccggttgtccgtatacatcagattgtctttcggacctctatagtaatcttcctcccaagtggcaggccctgcggcgcgatgattgtcgaaccatcctttccggtgcagtaccgaatcgaaaggcaacagatttgccttggcgtcttcttccgaatgttcggcagaagcccatccggaagtaaaagtcatcacccggctcggatcaatggcatgcgcctttttcatgtcttccatacgcagggcagtcagttctttatctctggcacgaggacctccccattcatttatcagattataaatgacgagacttggatgacttctgtcccgcaagatcattcgttgcagtttggtattgactatggtccggatgaagggatcgtgtcctgcggagtgaaaagatcccggctcttccagatatagcagtcccagttcatctgctttttcgagcactaccggcgaaccgatggaacgatggaaattcagcatattcagtcctaaagccttggctgtaagtatctgtttttcggccatttccggagtggcatacaagccgcccacaggccaatatccccaactgatggcggtaagcagcatcacccgctgcccgttcagtctcaactgggcatcttttccaatccctgtcggttcaaaccagcggaaaccgaaagtccgggaatctgcatcccatattcttttagccgatttgagttcgacccggcaaacgtacagatgcggggaatccgggttccagagtttcgcattcgggcagttcaggtccatggttatcgtattttctcccttttgcaagataacgttcttcaaatccttgcgagctataattctcgatgggttttccttttctgcaactgtgaacatgagttgccccttttctgtattcatcaaggtattgttcactgtcagaatcgctttcactttggtatattccggttggttctgcatatagatgtctgatatgaacaaaggagagactgcatccagacgtacccggcctatgattcctccgaatgaccttccgggcggtatctgatagctgccccaattcatctccgtgaagtcctgccaatggaaattacctcccggatgtgtcacccgtactgccagaagttgctcttcaccgggtttcaccgcttctgtaatatccacgtcaaagggggattctccaatcatatcatatcccaccagtttcttgtccagataaatctcggcacgcatacggaccgattcaaaatgaatcagcacccgtctgcctttcagtgttgccgggagtttgatagttctaaaccaccagctgactcctgctccatcgtccggacttgggcgactggaaactgtacaatattcctccacggttcccggcacctgcacggctgcggcattggccggattcagttgttcccagcctcctgtcggaacattcacaggaagaagtgacaaatccgtagcatcttccggcagaaacagtttatcgtttttccattccgcctgcttgtcctgccataaatgccattctccaccatccagagaaagagtgtatcttcccgctgttttatcgccctgttttgcatctaccgacacacttgtccatccacatagtatgcacaagtataacatccaactttttttaaaagcattcattgtttttcatctgtttattgagaaagtacgtcagatgcaaaattataggggaggcattaataaaatagtgtgatggcgattaatacagagttaatctgcaattaaaacccattaatctgcgtttggcggcagaaaagtctgttttgtttggggtattacttagggtgatttatttttctttggattaagttatttaccagtggcttgctttgactcaaagtttagtatttggcttgatacttcttataaaagataaggaaaaggatgaagccgatcaatgcgaacggaacacctgtcagggcgggataacggtagccgccgctgattgccagtcctcctgcataagctccgatggcatttcccagattaaacgctacctgtacacaggcagctccgagcatttcgcctcctttggccacgcggataatcaatatctgttccggactggatacggcaaacagccctgcggtgcagaggcacatcaatagtgcagccgcccatttgtagggagagaggaagaagataagcaatagcatcaggcagatcagtgcttgtgcggcagttcctacctttccgggagtgtagcggtcggagagccgcccgctgatcagatttcccatgaccataccgaatccggcaagaatcatcagcggggtgatactttcggcagagaaaccggagatatgagtgagcattggattgatatagctataccagcagaatacgccgccattacctaatgccgtagcacccagaatgagccagggagccggagttttgagaaagcggaactgtcctttgaaaccggtatctttcaacccttctacctgaggaacccaacgccagatgtaatacagaatgacgattccccaaagacctaccagcaggaaggtagcccgccacgaaagcatggtgcttaaagaagttcccagcggtacgccgaataggttggcgatggtcattccggctatcatgatggagacagcttctgaactcttgcctttatcggcaagcctttccgcaacgatagaaccgaccccgaaataggctccgtgagggagtccggagatgaagcgggagataagcagcatccagtagttaggtgataatgccgcacagatattgcctaccataatcagcgtgactaataccagcagtatatgttttaatggatatttacgtgctaatgtcaatacaggagcgccgacacaaacacctaatgcataggcggaaatgaaatgtccggcagcagggatgcttatctttaaatctctggctacatcgggcagtatacccatcatcacgaactcggcgatacccagtccgagggtaccgaatgccaatgcaataagactcttcttcatacgaaactcaacctgatacctgttactttttaccttctttatttagcgtattttttacggggtgcaaaggtaaaacaaaatctctcagaatgagttcgtcaggaatgattttgatttaaatcaatttattgcttttttatccactcagccatgtctttcaggacttccggatttatcgtctcttccagttgtccgtattcggctaaagttcctttctcacaagtttgaaacaggtggttcagttttggataggctttgattgtcacattcttgtttccgttctcgctgatgtgctgcttgatagcagccagattcatatcggcatctacctgaatgtctttttctccgtttaatgcgaggaccgggcactttatttttttcagacttgcagtcggatcgtatctcataaagtggagataccacggtgaagtcatggagtttatttgggcagatagttgttgtacggtattcaggtctttcaactgttcggcagacatggttctggtaacatcagcgtaaacttcttttctgatttcatccgccgacttgtccgtttgctgtaataaagagtatctgtggcgaacggacggtttcattgtctgccacaccggatcgggcatcccttgggacttggaaatcaattccacttgtttaagcatcaagctgtcacctcgcacggcagctcctgccaatgatatgataaatgaaatgttggagtctttggcggcaatatcaaatgcgattgttccaccgcagctatgtccgataatgccgattttccgggtattaatttcttttctgctgcgtagatagttcagcgctgcttccgtatcttttgcgaaatcttcgttggtagcacttgcataatctccttgcgaagcggctgtgccacgatcatcgcatcttagtacggcaattccgttacgtgtcagataatcggcgataacaagaaatggtttatgacccatgatttcttcatctctgttttgagcaccacttcccgtaaccaatactacagccggaaatttattccctttctccggaagggttaatgtgcctgctagagtgattccgtcctgcgtattttttacgctgacttcctcgaccttataaggaaaaggtggctgaggctcctgcgggcgtttaggtccgctaaactctcctttcgtcagattcaatgggaggggcattccttgtgtgaatgtgccggtaatggtttggtcggtattcagctttcctttataagaagcatggataatcggtatctgaacagtcagtgtagagtcttgaaaagaagttgtttccgtttttatatctttggttccctgatcggggctgtcaagagttgtcacataagtcccctgttccgtatgcttgatatggaatacaatggttaacgagccggtaggaagggagagtttaccatgccaagtgcccgaaatgtcttgtgcaagtaaggaagaagataatgtcagtcctgtcagtaacatagcgacagctgcaatcttagttttaaatgttgttgttctcatattataaataatggttgggagaattagaattcattctttacgtagtagtcaaaatacttgcattcgtgcacagcttgcttgaaaaactgcgtgtcggaataggattttgccagttgatagaaatagctgtccaccttcttttcttcatccgaccgtttaaaatcagggtcgaggatgttgttccagttatcccaccagttttgggcataaaggtccattgtacaggaggatgccataaacaatgcgcgtgctttccattcacggtcggtaaagtaagtggcagcctgttcatagagggcaagggcgttctccatgttgttgatagtcatgtattcttgggtgaagtccctgtaattgtactctttgctgtaatcgggaatacggtttgaaactgccgagccgtatgatccatacgcagaccaataataggaattatctttgaagtacatgggaatattcctgtagtaaccggtaggggatatgttataataatagttggccagcatataggcagcccgtgcgctttcttccgtcatcatctggctttctttttccagttgtatcagggcggcggtcaatgtagctttatcgtgttcttggttcaggtagggatactgttcgtacatcgtatctgtcagctgcgaatcggcaggtacactaaacagtctcttgaatccattactgaatatcaatggggagatttttgaatagccgttgaactcgttcggcaggatttctacaggaatatatttctctgtttcataatcgtaatcatagtgagtgatactgtaagatggcggaactttggcgaaccatttcgcagcttcttcaaagttattcatgcgcaggaaatacgttcctttcaattcgtaaagctgggttaacagtgcttggtcattttctttctcagcattactcatgagtgaattgataatattcggatccggattctggtgcaagtcctctatacggttgtgagtaaggaatgctttgccgtagtccttctgcatcttatagagatggccgacaatttcgttgatgaaatcttcatcggcattactcgtctgcaggtattggcggatcgttttttcttcgtctgtaccgataaacttcaattgcgccagatagaggctgaattgtgtgcggcttttttgtttcagcaattcgggtttcgtggtccggacggagtcgatgagtgcggctgcttgttggtagtctttgcagaggaacgacagatgtgccaggtagagagcccaaaagtctttgtcgtccactttggggtgattcatcactgctttgataatcttctgtccgcgttcatactctgcaagtacttttccggaaggctgcatgaatgagcttgtgtcatctgtggcattcgaatgattgtatcgggtcagcacattcctttccatcttgttgatataacggatggcgagcagcttgatatagggagattcgggatatatttccagaatattttccacctcttccagttcgttggagaaggtattatatcctcggagcgcgtacatggccgctttctcccgattgtctttacaccaggtcagcgcttcgttccagtctacttcgctttggattctgaaactggaataggctattttctttctgttgtccgaatggtcgaacacacgggagtagaggtagttggcatttgccagtttgcctatgttgtagagggctccggctgtttgttcaagggcggcgtagtagatataatgttcctgtttgagaggttttacgtataggttgtacatccggatggcttcgttgttcttgttgcgcatatagtgtgccaagcgtacgagctggtagccgtatcttaattttagttcatgatatgggcagtgctggtagagttccagccctttgtttttgtagtggacgtacgtctcttccgaaggggaggcggtacgtttcatgtcccaccagccatcgttttccgatagttgtgcgtagggtttcagttcctttgcatattgcaggtaagtgagggtatgctttcctgcgtctgtcttgttcagggcgatgacgtatggggaagaaggttgctttaacgactggtaagaagcggaatagagcaatgttttgaattgtgctgcatccatcccttgcagggtgttgtttttcttgaagaatgtcatccacgcattcaggttctcgtcgggttgctgttcggcgtccggattcgtgtcttctccatagaatgcgtagtctgtagtcaggaggaaaggttgcagacctttgttctctaaaagaagttggtcgaaaagattatagtagttcatataatcgtagtaatcgcctccgcatccgttgacgtaggagtggaagggagtcaccgctatggcgagtgtgaggatagaacgtttcaggtatttcatgaaaaagcgtttatgatgttagttaattgttgtgtggaatattgtttgagaatctctttgtccagatggtagaagatgatttccctgttctcttttcgtagtttcctttgtaggagttgggccgcttcgagcaaggtttccgggctgacctcttctactttgagttcgtagtccttgttcacccatactccgcccagatagtgcgattggagtatgttgtagacaccttctttcgtttgtttataatattcgggacgcgcgtcgatagtagcttggcggattccgttaatcagtttaatctgtccgaacggatttctcacgattccccaactgtagagcggcagggcgatgtccagatgcagcggataggagccgacgtctttgatatatgaagcagcgtctttattgtttaatatggtgtttttgttttcgaagtccgtaggttccgatgaagcgtaatacatcagcgttcccttgtccacaggaggtattccggttttgtccttgaacttgatttgatgaaggcggatggtgcaacttaccagggctcctttccttagtttccggatgtgtttcaggaagttgaagtagttttcttttgtctttaccgtccagtcgcagtcgaactgatattcatttgggagcttgttgaaatgcgaacggtaaacggtatctatccggtcggcgcaattgcgggcaagcttttctatatctgcggcaggacattgcaggatggtttggttggtgataaatataacggggactacctcttgctgaaagtcgggattgccggaagaaggcgaatagtctgccgtagggaatgccccatttcctttattgtctacatcgaacatacgggcatatatcttttggactccgagtgtattcagataagcagtatccgcgtcttctgcactcaatttgcttttccagacataaaatgcgggagtattcgtatgtctatcgatgcatccggacaggcaaatgagtaaaacagctagttgtagtagtcgaatctgcatatgttatgaagtatcccggatcattaagttatattccgacagaaaaagacaataaggatacagaggacaaagttatgaaaaaaagatgcttttacaattgaaacgcaaaagtaaaagtgaataaaattactaacttagaacaataaccagcaaaggatggtggttgtaaaacagtcaccctccaattttttaatttggtctttgatatatggggtacttcaaatagcgtaagggagttaaattggggtgatgtgaagttaggtttgtatattaagatagtgcatttatagatatggatggacattactccctattattaaacatatgttctatttaaataaataagcactgactaaatttgcatcattataaactatataatattatgaaaaaaataatctatcttgttcctgcgttatctttagcaggttgcacttcacagcaggtagaagaaaagccgaatgtgattgtcattcttgctgatgatctggggttcggtgatgtcagtgcttatggttcaactactattcatacaccgaatattgacagtcttgcccgtgggggagtttgtttcacaaatggatatgctacttcggctacttctacccccagtcgttatgccctaatgaccggaatgtatccatggaagaataaagatgcaaaaatccttccgggtgatgctcctcttattatcaacgagagccaatacactttaccaaagatgatgcgagagtgtggttatgtgaccggagctatcggaaaatggcatttgggcatgggaaatggaaatgtcaattggaatgagacagtcaagccgggagcaaaagagattggctttgattactcttgtctgattgcggcaacaaatgaccgcgttccgactgtttatgtagaaaatggagatgtggtaggtcgtgatccgtcagatcctattgaggtgagttatgaacagaactttgagggggagccgactgctatatccaatcccgaaatgctgaaaatgcaatgggcgcacggacataataattcgattgtaaatggaataccccgtatcggttatatgaaaggtgggaagaaagcccgttggaaagacgaagatatggctgattattttgtagacaaggtaaagaactttattactgaacacagagactcttcattctttctttattatggtttgcatgaacctcatgtgccacgcgcgcctcatcaacgttttgttgggaaaacgactatgggacctcgtggagatgcaattgtggaagcagactggtgtgtgggtgaattactaacttatttgaagaaagaaggacttctggaaaagactctgattattttttcaagtgacaatggtccggttttgaatgatggatataaagatggtgctcccgaactggctggcaagcacgctcctgccggaggattacgtggtggtaaatatagtttgttcgatggaggtacacatattcctttattcgtttattggaaaggaaagattcagcctgtaaaatcggatgcactagtctgccagatggacttgttggcgtctttaggaagcatggtgggagccactctgccggatggactggatagtcgcaactatttaaatgcattcatgggaacagaactgaaagctcgtgaaaatttgattattgaagctcaaggcagactgggttaccgcagtggtgactggattatgatgccaccttataaaggttcgcaaagaaacctgaccggaaatgaattggggaacttggatgaattcagtctgtttgatgtaaaatcagacaagggacagaaatctaatgtagctggcagacatccggaactgcttgagcggttaaagcaggaattttttgtgcaaacagatggattttatcgtagtgaggtggaagaagaaccattaaaataagcccgataaccccttctggaaagcatttgattgattaggtattagattgttttgcaggaattggtgtagaaggatagtttctgaacatgtgtgctcataataaaacatattttctatcgtctacaccttttttcttttacttttgctgcatcacaatcatacataaataacgtttaactttttagaatcatatgaaaacactcatccaatttttattggcgacattcaccattttagcttgtgtatgttgcaagactgcaaaagaagaaaaaacagacgataaattgaatgaaattacctttgcagatccgactatatttgtagaaaatggcaagtattatctcacaggtacgcgcaatagagaacctaatggatttgctatattcgaatctacagatttgaaggaatggaagactgctaatggagatactcttcagttgatactacgcaagggagattccgcttatggtgaaagaggattctgggctccgcaattatttaaggaaggaaataggtattatctgacatatacggctaatgaacatactgcactggcatcctccaactctgtatatggtccattcagacaagactccatacgtcctattgacgagacggccaaaaatatcgattcatttttattcaaagattcagatggaaagtactacttgtatcatgtacgtttcaacaaaggaaattatctgtgggtagctgaatttgacttgcagaaaggctgtattaagcccgaaactctgaaaaagtgtttcgataatacggaggcatgggaaagaacgcctaattataaatcggcaccagtaatggaaggtcctactgttgtcaaactcgatgatttatattatttgttctattctgccaatcatttcaagaatatagattatgctgtgggatatgctacgtctacgtctccttacggtccgtggaagaagcatgcaaacaatcctattattcaccgaagcatcgtccacgaaaacggctccggacatggggatttgtttaaaggtttggacggaagatattactatgtatatcatgttcatcattcagattcaattgtgcagccgcgtaagacacgcattgttccgttaatcttaaaaaaggaaaatgacgtatatagtataacgattgataaagaaaatgttatcaagccaatgtggaaataatagaagtatataaaacaatatgtattatgatggatggtaattttatatctcgaaaaagaataggaggcatagttgctttatcctttttacagtttggaaatctctcgggacaagagcgtccgaacatagttatgatattggcagatgatatgggttattccgatatcggatgttatggtagcgagatagaaaccccgcatattgatagtttggcgttacagggaatccggctgactcaattttataatacttctcgttcctgcccaacccgggcaagtcttatgactggtttgtatcaacatcaagctgggataggatggatgtcagaagatccttttaaaaatgtcgataaagatccgaaagactggggtgttgctgaatataggggggctttgaaccgtaattgtgtgactattgccgaagttcttaaaagttcaggttaccatacctatatgacgggcaaatggcatttagggatgcatggcatggaaaaatggcctttgcagcgtggttttgaacgtttttatggtatattggcaggggcttgcagttatctgaggccagaaggtgaaagaggattggtcctagacaacgaaaagttacctgcacccgaggcaccttattatactaccgatgcgtttacagactatgccgttaattttataaatgaacaaaaagataatactccctttttcttatatttagcatataatgctccgcattggcctttacaagctaaagaagcagatatagagaaatattatgaactgtatcgtacgaaaggctgggaccagattcgtaaagaacgccataaacgtatggccgatttaggaataatcgactcagagatcggttttgctgaatgggagaatcgtcagtgggaagagctctctgaagcagaaaaagatcatacagcttatagaatggctgtttatgctgcacaagtgcattgtatggattataacataggaaaactgattgagagcctgaaaaagagtggaaagttggataatactttgatctttttcatgtctgataacggggcatgtgccgaaccgcataatgaacttggtggtggcaagcaaaaagatatcaataatccggcggtaagcggccatccttcgtatggcaaagcttgggctcagacctcaaatactccattcagaaagtacaaacaacgtgcatacgaagggggaatatctactccgttgataattacatggaaaaatcgtttgaaaggttttgaaaatacatggtgccacgttcccggatatcttccggatatcatgccgaccatactgaatgtaactggtgccacatatccttctacctttcacaatggtaataagatacatcctttagtgggcactgatcttatgccggctataaaaggaaaagtttcttccattcatgaatatatgtattgggaacatcagggtaatagagctgtccgttggaaaaactggaaagcggtatgggatcaggaaggaaaagtttgggaattatatgatatcgggaaagaccgcgtggaggcttgtgatttgtcagccgttcatccggatatccttaaacagttatcggacaaatgggccgtatgggcagctgagacaaaagttttaattccatttcctaataataaaaaataatatatagccatgaaaagaatagattatacttttatgttgacccttggtgcgtcaataggtgcttgtcctgtattggcccagcagaatgtatcaaaacctaatattgtccttatattattggatgatgtcggatattccgatttcggatgttatggttcggaaataaatactcctaatatagatcggcttgctgaaaatggtattagactacgtcatttttataaccaggctcggagtgcgccaaccagggcttcgttgattactggtttatatcctcatcaagttgggaatggtgctttagggaaagttccgggttatccggcatatcagggatatccaaatgagaataatgttttcttgcctgaagcattgaaaacagctggatattttaatgtcatgacaggtaaatggcatttaggatattttcaaggtgttactccaataagcagaggatttgaccgttcactgaacgctccgtttggcggctattatttttcttctgacaaatcattgaagaagaataaaaaagaaagaaccaaccaacgaaatctttatttgaatgatgaagaaattggattcgatgatgatcgtttacctgaaaattggtattctactcatttgtggacagattttggattaaagtttattgatgaagctattgaagaaaaacagcccttcttttggtatctggcacataatgctgcacattttcccttgcaggctcctgtagaaaccatcaataaatataagggaaaatatatgaagggatgggaagatgtgcgtaatgcacgattcaaaaagcaattagaattagggttattcgagcgtcctgaccagttaacacctcgtaatcccaaggttccggaatgggattcactgactcaggaagaaaaggagcgctatgacatgcagatggctatttatgcagctgttattgaggaagtagatcggagtatcgggcgtgtggtagaacatttaaaagaaaaaggtgtgctggataataccctgattatcctcctttcggacaatggtggaaatggagaaccgggcatagaaggacgctttgctggaaagaatcccggttcagcggggagtacagtttttctgggtgctgcctgggcagacgttgctaatgcaccattcttcttgtacaaacatcacggtcatgaaggaggttgcaacacaccgtttattgtttcctatccgaatggaattgataaaagtctgaacggcactattcaaaaagacaattacggacatatagtagatatcatgcctactttggtgaaacttacaggcgctacttatccctcttcgcgtggcggccataaagtacctccaatggaaggtatatccttactgcctttattaaagggagaaccggtaaagcaaaccaaaccgaccattgtggaacacgaaggcaacaaaatgctgcgtgacggagaatggaaaatagtgcaggaatataaagagccgaaatggaggctatacaacttggagaatgatcctactgaaatgcggaatctcgcagatagggagcctgaaatactgaaccgaatgattcatgattaccaaaaaatggcagatcatatcggagtagaaagtgagatcgaattcaaggttggcaaatggtatactcctgtagaagaatatctcaaataagaagtatcggaattataatctttaatttataacatatgaaaaataagtatcgtaaactagccgtcatcatgctgactgctgtatgtttcgcggggtgtcaacaagaagatattgtatatcccgaaccggatgcaaaggtcgctgaaacttatttgaccttaaacgagctcactcagtcccctctacaagtaccgggaccagagggaacctatatattgaaagtgatatctgatgataaatggacgttaagtagttcacaagcatggtgcagcgtatcagaaacagaagggttcaaatattcccaagtgcctgtttcgtattctgagaatccatggaatgaacctcgtacggcagaactgacttttcttatcaatgaatcgcaggagataaagatagtaactgtggagcaagaagccagcgaaacttctttggctgcggactctaaagaactgcaatataacattggaggaggtgaaaaggatattactctacaaaccaatgcggtagaatggaatgtcgaagtagtggatgaaccgacccatactccggttaaatggtgtacagtaactcctgttacaggaaaaggaacagccactttgaaagtcactaccgagagtaatacgacagaagtggtacgtaaagccagtttggtttttacagctgccgacaagagtctgagtattcctgtcattcaggccgacaaactggaagctcctgtcattactttggatgatcacaacgatttcctgctttcatggaatgaaattaccggtgtggacggctataagctgaaagtcattgcagaccagaacgaaaacacaatcgatattccttcgggaacggcatcttacaatctggatgttattgactggaaaggatatgtaggaatggtttctattcagttattctcttacgcaaacattggcggaggaactgtagctcagatgggaagtgaaattatagaggcacacaatctgtttgacgagaccagtggagacggagaaaaaggatctgaatatattatcacgaagccccgtcatttgaggaacgtcagcaagtatcttgataagaactacaaacagactgtagatattgaccttacaggcatagatatggcacctatcagtacagaactggtcaataacacttataacggtaatttcaccggagtatacgaagcaactaagggagatattatcgataccggtacaggacgttcttccgaacaatataagataaagaactggacgctgaataaaagttccaatactaattgcggtttgttcgcttctatcggtgcagaaggtatcgtacgtaatgtatgtatcgagaatgttgttatcaaggccaaagccaaagttggtgcgattgccggtaactgttctggtaaaattatctcttgccacacaacaggtaatgagggaagcatcagtacggctgcaactacggatgctgaaatctatctcggaggaattgtcggttatctcaccgagaaaggcgaagtttcctattgctctaatacagcggctattgaagggacagccggttgtgtcggtggggttgtaggaatcataatgcgtgatgctaacaatgctcctgccgttgcatattgtaccaataaagcgaatgtagtttgcagcagcaaatcaccggttggaggtgtggtcggttcaatagcgggagcagcaggaaatgacctgatcaaagtgactggttgtgcaaattcaggagaaatttctggaactcaggctaacaatcaagtaggaggaattgtcggtcgtgcaactattgataccgaaatatcccagtcttacaatactggttctatcactgcgatgggctcggcaagtggtatcatcgcacgtatgggtggaaccaatgctatagtcagagattgctacaatacaggtgcgataaagagcacaggtacagctaccaatggcaacagcaatgccgcaggaattgtagcgacatgtactatagcagcaggaggtggcatgacaatcgaaaactgtcataacgtaggagacatgacaactgcgaacggggcttctttcggaaacggactgttccatcgtactgatggcaagatttctcaaataacaatgaaaagctgtttctctttgaacgaagacggaaagtcacagagtagcggaagtgactcatacatatcaggtggttcttccagttataagaacctgtctgcaagtgaaatgaagaacacatcttcattcacaaactggaatttcagtacggtttgggaaatgggaagtgaatacccgacattacagggcttattaaaataaggtttaacaatcaatgaataacgaatataatattatgaaacagaagattcgatttaagttgacggatagatacttagtcctactaatatgctttttaggatatatatcaaccgtatcagcacagtctcataaaatttccggtgtggtagttgatgaaggaaagtctcctatcattggagctacaatccaagtgaagggtgctaacaacggaaccattacagacattgacggtaacttctcgctggaagtaaaaaatcccaaggcccagttacagatatcgtatatcggatttactactataactgttccggtacagttaaaagggaagatgacgattacaatgcaggaagcatcacgcaatttggacgaggtggtggtcatcggctatggaactgttcgtaaatccgacctttccggttcggtaagtgctgtcagtatgaagaatgaagctgagattatgcctatcacaagtgccgaccagtttttgcagggacgtatagcgggcgtcagtatcgcagctaacagtggtgcacccggagcgggcatgaatattcaaatacgtggtgtctctacactgtcaggcaatacagacccgctttatgtagtcgacggtttcccgatagaggctgcaacagcaagtgtaaatggtggcaccagtgagttgagccaacagccggcgatgaatccgctagcttccatcaatcccaatgatattgaatctatccaggttctgaaagatgcttccgcaacggctatttatggttcacgtgctacgaacggagttattctgatcacaaccaaacagggaaaagaaggaaaagtcaatgtgaattacaatgcccgtgtagatatttccaacatttccaaacgctataatttactgaatgctcatgactatgcgctttttgagaatgaattggatcgaacctctaacggctacgatatgcaaggaaacgtcattccaagtacaaaagtccccagacatacagatgatgccttggaaagatataagatttattcaactgactggcaggacttaatgtaccagacggcagtatctcaggaccaccagttggctgtcaatggtggtaacaagatgactcaatataatattactgccggctacaccgatcaagaaggtattattatgaatactggactcgaacgttattctttccgtctgaatcttaaatctgagcttgccaagcgtttagttttgcaactgaacacaagttattcacagactgagcagaagcaaacgtcgcactctcaatcttcaagtatgaaccaaatggtacggcgtattttgactaccaaaccgacattaatgcctggagatcaaatttatgaagatgaaaatgtggaatatgttccggcagacaatccttatattatggcgaccgaactaaaagacattcttcaacaacggttcttcatactgaatgcatctttgacatataactttggtaaagggctttcctggaaaggtgccggtagcttcaaccgcacagacggttcgcgttctacttattatccaataggtaccaatgctggaaacagtgcccatggtatggcatttcgtggagaagacaatcgccagaatattgtattggaaacgacggttaattatgatcgtaaatttaagaagcatcatcacatcaatgctgtcttgggatatacgcatgaagaccgtcagagaaagacactggcaattcaggtaggtgattttgcaggcaatgacttgttgtactacgctatcggagaaggaacgaatacgatggacaaatccagttcagtcattcaaactaaactttcctctttcttaggacgtatgaactacaccctgtatgaccgttatattttcacggcaaccggacgctacgacggttcttctttgttggcaagtggaaacaggtggagtttctttccatcatttgcagtagcctggcgcattaatcaagagaagttcatgaaagacatacctgctatctctaatattaagctacgtttgagctatggtgttacaggtaaccaaagcattgcttatgctgctccgctcgccattatgaaccatgtccgctcttattccggaggtgcagtgactcacggtatggtcaacgggaagctggctaatcctaatttaggttgggaaagtactgctacctacaatgccggactggatttaggttttatagacaaccgttttagagtaaccatgaatgtatatcaacgtactaccaaagatatgctgatgaattttggactgcctttatcatccggatacggttctataccttacaatatgggaaaaatgaccaataaaggatttgagctggaagccagtgcggatattctgacaggtcgcgtaaaatggactcttggaggaaacatatacctgaaccgtaataaagtagacgatatcagcggcaatgagttactgggaacctcctatcttgcaggtggcggtgtattcagccaaagcatacatatcactaaagccggttatccggtaggcagcttctatggctacgtagtggatggtgtttatcagaatgaagcagaagcaaaactggctccatttgatactccacaagctactccgggttctttgagattcaaagatattagtggacccgacgggctgccggatggaaaaataacttctgacgatatgactatcatcggtacggcagaaccgaaattcaattatggtattaattctgagctatcttggaagggcctgacattatccatgattttcacgggccgtgtaggaggtgatatcgccaatttgaaccgttatttcttggattcttttacagataccaacgacaatattcgtgctgaggcttgggaaggaagatggcagggcgaaggaaccagtaacttttatccggcagtaaacggttcgcaaggcagttcttactttaacaagcgtttctctaccttcttgcttgaagatggttcatttttccgtctgaagaatctgacactcgcctaccagtttagcttgaaaaaactacgatggttacgtagtgtacgtgtattcggtaccgttaccaatgtctttacaatcactaattatagcggttacgatccggaagtcagcattacttcgggcgctatgtcacctaatgttgactatgctgcttatccttctagccgtacgtattctatgggtataaatctagctttttaacatcaaaatactgaaaatatgaagaaatatatattatccttactgataggaacagcgctgctttcaggctgtttggatgtagatattgtagaccgtgtagaaaaagaggacggattcttcaaaacggaagatcatgccttggcggctattaacggggtatactccactctttacgctttcgcttatcataaaacaaactgggctatcagacttccgacctatgaagacgctatgttctctaccggaaacgctgtacctgccactgtttccaacaatacacacagtgctggttccgctccagttgttaatttttggggagagctatataatggcattaaaaatgctaatgaagtaatagcacgtgttccttctatttccttcaaaagtgaaaatgataagaatcggatcattgcagaagcctactttctgagagcactttatcattatgacttaatgcgcttgtatggtggtgttaatggtattcctattgttattgagcctgtaaccggaattgaaaacgcatatgtaccacaatctcccgcgtctaaagtttacgaacagataataagtgattttgaatatgccgccggattgaacgatgatgatactccccgtttgccgaaacgtttagatccggcgtacacaagcggacgtgtaactaacggagctgctcatgcatttttggcggaagtctacttgactctcggaagatgggaggatgcagccagagaagcccaagaggtgatttcttccgaacaatatacgtttgtcaatgattatcagaatttatgggacattgagcaagagtcattagctcaaaccgaacatatcttctcagtacctttctttcgtgacaaagatgctttagcagatcagtcattgggttctaatattgctcatttatttaatccggcaggtgtgcaggttggtggtaaattggtttctggaaatccctatggaaaaggagcaggagctcatagggtacaaaaatggtttatcaaatattttcaggacgatcagggtaatctaggatacagtgacccctctgttgatgcatccattgatgaatccaaactcatttctaaagattaccggattgaggttacattctggagacgttttcaacaaaagaacaataatacaggagtattgggcaatatcgtaaccgtatatcctgctgccggaggaaactcacaggagaactggggatatatccgcaaatttattgatccgcaaggtatcaataaccgtaccaatgaaaacgatatgccacgtctgcgtctgtccgatatgtatcttataagagcagaagcattgaacgaacttggaaagtacacagaagcctgtcaggctatcgatatggtgcgtgaacgtgcgcgcaaagcgaacggaaccgaacgtgcttatccgaagtatataggttcggacagacccgataatatcggacgtaccttgaccaaacaagaattccgctggctggtattcatggaacggggattggaatttgccggtgaacagaaacgctggttcgaccttattcgtatgaagtatgatgaaaacacgcagatgtatgactacataaaggatacattcatcccatcacgaccggctgcggatgtacaaaagcaaggagttatggctgcaagaaagaaatattttccgataccatttgcagaggtttctcgcaatgatggagtacaacaaaatcccggatactaaagatatatgtttaaattaagcactcccatgaaaggagaaataaattatgaatagactatttttgagtgtttctgttgcattaagtgcgacaacttgctcttttgcacagcaaatcacgcagcctaatttggtgttgttcatagccgatgattgttcatattacgatttaggttgctatggaagtgtggattcgaaaacacctaatatagataattttgccacacagggagtgcgtttcacccaagcctatcaagctgctcctatgtcatcgcctacccgccataatctgtatacaggtttatggcctgtgggtagcggagcttatccaaaccatacttgtgctgatcagggtactttaagcgttgtgcatcatttgcatccattggggtataaagtagctttgattggaaagaagcatgttgctccaaagtcagtatttccctttgatctctacgtgcctagtgaaaagggggaattacattttgaagctattcagaaatttatcgctgattgcaaaaggaaaggccagccgttttgcctgtttgttgcttccaatcagccacataccccttggaataaaggtgatgtctcacagttcgatccggataaattaactttggcacctatgtatgtagatgttccacaaacacgtcaggagtttactaagtatcttgcagaagtcaactttatggatcaggagtttggtaacgtactctctattttggaacaggaaaaggtcgctgatcaatctgttgtagtatatttgagtgaacaaggaaacagtctgccttttgccaaatggacttgttatgatgcaggcgtacattcggcatgcattgtccgctggccgggagtagtcaaaccggggagtgtcagtgatgcattagtagaatatgtggatatagttcctacttttgtcgatatagcaggaggaaaaccgcagacgagagtagatggtgaaagctttaaatctgttttgacagggaagaagaaggagcataagaaatattctttctctcttcagactagcaggggaataaataaaggtccggagtactacgggatacgctcagcctatgatggaagatatcgatatattgttaaccttactccggaggcaacctttcagaatgcgatgactgctacgcctttatttaaagaatggaaacagcttgcagagacagatgcccatgcaaaggcgatgacattcaagtatcagcatcgtcctgccattgaattgtacgacgtacggaatgatccattttgcatgaacaatttggcaggagatacgaaatactccaatattattattcggctggatgcagaactaaagaaatggatgaaagcgtgtggagacgaagggcaagctaccgaaatgcgggcgtttgatcatatgccttccaaacaaaagtgatttgtaaacagtgtgcagattgaagtagatacttctaatggtcttcatcctatgggacaatggattcaggaggataaatgttttatctttgatattgatgaggtaagttatctcgctatccaatgacagatataaataaacctgttaatttgaatgaaatgataaaaagtataataatgcgaattaaactaatacggtgtatagaattaaaggctattgtaacattatctttagttcttattaatagtggaaacctattaataggtagcaacctgtttattagagataacaatgatttaagtgcagatacgattttgagatataatcactatcctacaggtaaactctatgtttattattccaaggaccaaacgaatcagagttctccggctgttattttcttttttggtggaggttggaattccggttctcctaaacaatttgaatcacaagccagttatttgaataagtatggagtaacagttgtattagctgattatcgaacccaaaagaatgcaggtactactcctaaagaagctttaatggatgcaaaatcagctatgcgttatttaaagcagcatgcaatgtccatacatgttgatcctgataaaatattggcaggcggtggctctgcaggtggacatttggctgctgcaacagctttttgtcatcaaattaataatccggaggatgatcttaatgtgtcatcaattcctaaagctttgatcctttttaatccggttatagataatggacctcatgggtacggattcgacagagtaaaagattattatagagatttttctcctatacataatataaaaaaagatgctcctcctgctatattttttttagggagtgaggataatattgttttgcttgaaacggctctaaagtttaagaagaaaatggaacatgtagggtcacgttgcgatttattgctatatccgggacaaaagcacggtttctttaatgctaagtttgaagaattttttgaaaaaacgatgtcagctactgtggtcttcttgaaatctttaggatatattaaatagaggcttttgatttgccagtcgttttttatcggggatttttccatttaagctgtttgcatattaaaaaacacttagaatttggatatttcctctttattatggttcatttctgattcgcttctgaatctgcttcccaaccactacaatcattgctgtcgaatacaataaacattttctttataaaaaataatatccgcaggtgcataaattaattcgtccgcctatagacaacgtttcgtccggctataggcaaacgcaacgtcggctataggcaaacttgcgtccggctataggcggacgaattaatttatgcactgcaaaggattatttattgcacaagccggagctaaatttagcataggaactctttatccaataaattatctactttcaacttttgagaaaaaagttgtcgagctattttggtggcatttatactatcatttatctctctgtatcatttatagttaggtcagaaaatgagaatcaataaatttcaaagtagaagtattcttctcccaagataacctggataattgtcgggaagcttccttctaaaaaaaatccttgatgaaaagcctatgctgcagaaaataataagacgataaagacaccatatggaagcaatggaaagggacagcaaacatatacgtttgctgctgtatatagcctaataataatggaagtagtaataccaaagtatatgatgacattacttcataatgaaacaccctttctccagcattacttatgcccaactgcatatgtgaatagcatctattctttcgtcataataacgtcatccgggacagaaaagccaattggtctcctttctgcatcactaatagattcatcaccttctgtctcattccaaatacctgttaattcatccagtttccagcgaatcttagtaggtgacaataactgtatgtatccacctgtaattcccttaccaccaaaatgtcttttacgttggtcataaaaccaaacgctaacataattgggattgatatcatctaaacgaagtgagtgattagaaacccaaatatacatgttattaggacgagggtcttttgaaaaatcccaatatacagggaatccactcatatagttctctaatacctctcctctaacagaaagataatatcctccataaagtccgttaattagatcgtttctccatgcctcttgccctttttgtagctttattttgaaaataatatcgttcttttgataaatccaagtaccttcataagaatccaaattcttagtaggacgtacattcttctgtgctgtaatagtattactaacaactaatgctaataagataaatttgaatgttttcattttatatgtacttgcatttttagttacatctaattataacctatgactattagtgaaaaattattgtcgggcatataattcctgcaatacacattccacgcaatacttattctttcgtcataataacgtcatctgggacagaaaagccaattggtctccttcctgcgtcactaatagattcatcaccttctgtctcattccaaattcctttttcctcatccagtttccagcgaatcttagtaggcgacaataactgtatgtatccacctgtaatccccttaccaccaaagtgtcttttacgttggtcataaaatattatacctaaacttcctaattcatcagtataaggactgtaagcccatataaacaaattattaggctgacactcttttaatacatcccaacacgtaggaagttctcccatataatcttccaatactcttccattgactgatagataatatcctccataaagtccatttgcggttttttttgtccatagctgttgacctttttgaaatttaattttaaatacggtatcatttttctgataaacccaagtacctacataagtatctagtatcttagcaaaattttgattttcttgtgctgtagcattaattcctagaactaatagcaatacaataattctaaatgttttcattttacatgtactttcatgtattaaatattaataagcattagatataagtttgttttttaatttacagattcagttgtttgataaattcagtaggagtgatattaaactctttcttaaaacattttgtaaaatagttagggtcggacattcctacggcgtacgaagcttccgagacattcatgccattctgtaaatgaatctttgcttctttcatctttatagtccgcatgaactgggtgatagaacatccggtcaatgatttaagcttggtatgcaacaggcttcggctcactttcatatgagtaataatttcagtaactccgaactcttcgtctttgatattggccataatcaggtcaactaactctttcataaatacttcatcacgtggattgttcgttatttgtgtaatgttcagcttctcgatccgcttgaaatactcaatgttctgctttctgttagtacgcatattctgaaccaatagttccagattctgtgcattaaaaggcttggttatatacgcatccgcccctttcaagtacccttgagtatgatccaattcatccgttttagcagttagcagaattaccgggatatgactgctattcaaatcctgtttgacgtatgccgttaattccagaccatccatcacgggcatcattacatcgctgactatcagatcgggcagttgcttcttcagtaacttacaagcctcagcaccattgtaagcacgaaatacctgataatctttgctaaatatctctgccagataatcattcatctctttattatcttctacaataaggatactttctttgacgtcggtgttatcttgctcggtagaaatcaactggtcgggaatcagttcgatcgtttctttcatccgcagattatatttctgtatttcttcggacgtgatactttccaaagatttctccgaagagctataggcagattctgaaacattcaggctgacgataaattccgatccctttccgacttcgctttcaaccttaatctcccccttatgcatatgaatcagtgacttcgtgagagataaccccaatccgaagccttctctatgatcctttttttctacttggaagtagctgtcaaagattttatctttcatctctttaggaatccctctgccgctgtcttttactgatatttcgatgaaattttccgaatcttttttgagaagcttggcactgagtttcacataatctcccggctgggtgtatttgaaagcattcgacagcagattatacatgatgcgttccagcttggatggagagaaccagacttcttcatccgtttcttccagactgacaatgaaatcaatctccttttccttagatacaatatcgaagatatgagaaatctcttccaggaaatgcatgatgtttccttttctgacgttaatttccatttgctgcatttcgattttactgaaagtgagcagttcgtcaataagataatgcattctgttggcattgcggtagatgacttccagtttctcgcgatcattattatcgatttgtttctgtttgatgagccgctgaagtggtgacaggatcaaagtcaacggtgttttcagatcatgagatacgtacgtaaagaagtttattttcgattgattcatcttctccatattaacccgttgctcatgttccgttttcagtctcataagaagaatcaacctggctttggtatatttatatgccaaatagatgatgcagagaaccatacatacgtaggtcagataggcccatatagaaagccaccacggaggtagtacatggatagtcaactctttctgtcctttttcatcccagtttactccgtcattgcttgctttaatcttcaatgtataatctccggtcgggagattagagaaacgtacctgatgctgattgcctacaaactgccattctttatcgatgccttccagcttcatggcatattgcgttttatctttgtattgataattgagccctgagtattcgatacgtatggattgtgcctgttcgtgggtaagcgtcatcacatcactttcagagatagaggcgggcagtagcgcatccggattgctggaagatacgacatcgttattgctccatactcctgtcaaagcgatattaaaatgaggttctacagggcgcacctgttcaggatagaaagaaatcattccattaattgttccgaagaacagttcgccgtcgggtttcttgcagacagaggaataattgaactgattggtcggcaatccgtcggctatggtataccggctgattaatccggatttcggctgaatattacataatccgttgtctgttcctatccatatagtgctctgatcatcttctattatgccttttatagcgttcgatcccaattctttcttcgaataacttttcaatttttcgccttttttattcagaacaaaaagtccgtcattgttcgttcctgcccaaatattcccctgcgagtccatatataaataagtcatatacaacttactggatgagaattgtggaagaggtgtctgttcttctgttcgtttgtttatctggtatattccattttgacggtttccagtccagataatgctgtcattgaggttaagcatgcaaaagacaggaagtgcagaaacttttttcaactggaaactgccgttctgtttcttcaaggtaaatagtcccgacggccctccataccagattttgccggtttcgtcttctatgatgcagaaaccggatgagtttttccccattccgtcattaaaagaaagcgttttgttctctttgggcatataatagttcattccccgaagaaacagaccgatccataggttctgtttactgtcaatcagcaaggaatgtatattccgggcttttatattcatccgttcatggagtcgttcggaacgcgttatttcccgattgctgttcaggtagttaagccctccgtcttcggtagcaatatagagcccgttgtccggagtattgatgatctggcgtacagctttaccactcagatgattgggagagtttccataaggataaatccggaactgatccgaagcatatataaaataattcacaccaccgaaataggttccaacccacatgttatgattgtaatcttcaaaaaggctataaatgggagaatcgttcagattgctcaagtcactttccgactgctgatagtgagtcactaaccgaaaggtctggtcataaatgaaaattccattttcggttcccagccagatgttgttcatagtatcagttgttgcacatctgaattgtctgatatccttgatcgcggccagaggatacagcgaatcattattgatattatacacaaatacctcttgaggtgtattgaataacaactgattgccaggcaacataactaattgaatgcacgtttccaaaaatggacggatgttcaaaggcagcggttcaaattgttccttttttagattatagcgtttcacccctttgttactgtttatccatagaacattgtttgagtcttctaccagtccacgaatattttctccttttccttcatttaatataaaaggagtgaagctgtttttttcattatcgtattgatagatgccgttactgcatccggtcagtaatctgctgtcagacgtgttcagaaataagacactgttcttattgtttccctctatgtgatagcgtgtgaattgttcattctggggattgtatttgcagattccttgctccgtagaaatccagaggacattccggcaggggtcattatatagtttggtgataaaatcatggctgattgtagtggaatccccttcttcgtgaaagtaccgggtaatattatacccatcatatctgcataatccattcctggtgccaaaccacataaatcccttactgtcctgagatatggcattgacagtattatgagaaagcccttctgtaatgcttagctgtttgaagcggacattattatattggatttttccttccgcaaatgtcggatgaagcaggaataataaacaaactgctaccgatataagatttttgagtgtactccttttcatatctgattctactccttgtttaacgctcaaagatagtcttttttctatcggtttttctagtacaaatgtatattccattagaaattatgtgcacaatcgaagctttatgggctcaaacaatacatgcttccttatattgaacatgatgttacgaatgtttattctttgaattctctacatttgtatcgtaaaccaaatgaaaagaccatgaaaacaaaattttgcagaacggcagtgtattgcctgtgctgttttatgtttatccagccgataacaggaagccaggtaaatgatactcatgagggtgttttgcatatcgacaaacagaaaacacgcaaagtaagccgtgtccaatatgggttccattatgaagagattggtatgataggagaaggtgccttgcatgccgaactggtacgcaaccgttcattcgaagaagcaactccacccgcagatctggcggtcaaaaatgggctttatcagaatgtaccgaatccgcgtggaaaaaacaaagatgtatttcatgtagaccctctgatcggatggaacacttatcctctgtcttatactcccattttcattagccgtacagaagaaaatcctctgaataaggagaataagtattcaatgctggtcaacgtgactgaagatattgcaaacaatccggaggcaatgattctaaatcggggatattacggtatgaatctacgaaaggaggtatcttatcatctttccatgtatataaaaagcaaaaattatacagctcttcttcaagttatgctggtagacgaacaaggtaaaccggtcagtactcagcttgttttggatgtaaagggtaaagagtggacgaaacttaccggaacattaaaacctgataaagatgtcaaacgggggatgcttgccattcagccgttaggtaaagggcaattccaactggatgtcgtctctttattcccttctgatacatgggacaatggaaaatcagtttttcgggcggatattatgcagaacttgaaagaatatgcaccggatttcattcgttttcccggcggatgtattgtgcatggggtgaatgaagctaccatgtaccactggaaaaagacaataggtcccattgaaaatcgaccgggacaatggagtaaatgggcgccttactaccgtacagatggaattggttatcatgagttttacgaattgtgcgaatatttgggagcagatgctatgtacgtaatccctacagggatgatctgtacaggttgggtaaagcaaagttctccctggaatttcattcaaccggacgttgatctggatgcttatattcaggatgcactggatgccatagaatacgcaatcggtccggaaaccagcaaatggggggctttacgtgtaaagaacggacatccgaagcctttccctctaaagtacattgaaattggaaacgaagacttcggacctgtttattgggaacgttacgagaagatttatcaagcgttacacagacagtaccccgacttgatatacatagccaacagtatcataggcaaagaaaatgacgacaaacggattgatattgcgaagtttgtgaacccgaagaatgtgaaggtattcgatgaacaccattatcaacctgtcgaatgggcttgcaagcagcattaccgttttgacaactatgaacggggaatagcggatttgtttgttggagaattgggcattgacgggaagtatccctataatctgttagccagcggagcggtgcgaatgtctcttgaacgtaatggagacttgaatccattattggcagaacgtccggtgatgcgccattgggatttttcagagcatcgtcagttgcactctatgctaatcaatggggtagattgcagcatcaggacatctttctattatttatcaaaaatgttcagagaccacactttcgatgtatgcctggatgctgggattcaggggatgaagggtttgcagaatgtctttgttacgatgggatatgatagtgaaagtaaagaatatatcctgaaactgatcaatttgagaaaacaggaggtggtacttcaaacagcagtgaaaggatttgggaaaaagatacaggcacaaaaaataacattgagtctggaacccggcaagaataacactccggaaatgccggatgcagtaaagccagttcagtcgaccgtaacactggacttaaataaagatttgcagcttgaggcttcttcaatgattgtataccgttttaaataagataaatatgagaaatgcagcgttttgtattacgggattggcattacagggtttgtctatgtcattgatggcacaaaccgacaagccgaatattgtaatcattatgaccgatcagcagcgtgctgacctatgtggcagagaaggttttcctctggcagttactccttatgtagatcaattagctcaggaaaatgtatggtttaacaaagcatatactgtagcaccggccagttctcctgcccgctgctccatgttcaccggacgttttccttcggcaacccatgtacgtaccaaccacaacattccggatatcttttttgaacaggacttggtgggcgtattaaaagaaaacggatataaaacagcacttgtaggtaaaaaccatgcttatctgaaacctgctgacttggacttttggtcagaatacgggcattggggtaaaaataagaaaacgactcccgaagaaaaagagacggctcgtttcttaaaccagaaagccaggggacaatggctggaaccttcgccaattcctgtagaggagcaacaccctgctaaaatcgttaatgagacattgtcatggatagagagtcaaaaagagaatcctttctttgtgtgggtatctttcccggaacctcataatccttatcaggtttgcgaaccctattattctatgttttcgccggataagcttcccgtattgaagacgtcacgtaaagacttggaaaagaaaggagagaaatatcgcattttagcagaactggaagatgcgtcttgtcctaatctggaacaggacctacccagaatccgtgctaattatatcggcatgatccgtttaatagatgaccagataaagagactgatcgaatcgttaaaagccagcgggcagtttgaaaatacaatctttgttgttctttcagatcatggcgattattggggagaatacgggttgatccgcaaaggagccggactttctgaaagtctcgcacgtatcccgatggtatgggcaggatatcatgtcaagaatcaatcagcccctatggatagccatgtgtcaattgctgatatttttcctactctttgttctgcaatcggtgccaagattccggctggtgttcaaggtcgtagcttatggccgatgttgaccggaaaagaataccccaaagaagagttttccagcattgtcgtacaacaaggttttggaggagcacatgtcggactggattcttctcttactttcgaacaggaaggggcattgacgccgggtaagattgcatactttgatgaactcaatacctggactcaaagcggtacctctcgtatggtcagaaaagacgactggaaactggtgatggataactatggaaacggagaactatataatcttaagaaagatccttcggaagtagataacctgtttggtaaaaagaaatacactgctgttcagacagagcttctgacgaagttagtcgcatgggaattacgtctgcaggatccactccctcttccccggaaacgttatcattttaaacaggatccttataattatctccaacccgaacaataataaatcaaaagaatgtacatattgacggatattaaagacattgttccatgagctcaatcctgtaacagcctacttttgtatccgtaaataataaaactgtaatctatgaaatttatattgcgattaggacttgctttactgacaggatttgtctcagtcagcacagcatcggcacaagcatatggaactgctgatacaaacgctccggagctgcgtgtcccaaaatctgttcaaccggcatttgactactggatgcgtgacacatgggcaacactaggccccgacggttactactatatcactggaaccacttctacccccgaccgtcactttccgggacagagacattgctgggattggaatgacggtttgtatctttggcgctccaaagacctgaagatatgggaagccatgggacgaatctggtcaatggaaaaagacggtacctggcagaaagatcccaaagtatataaagagggagagaaatatgcgaagaagtctatcaataatgatccgatggataaccgtttccacgctgtatgggcaccggaaatgcactatataaagagtgcgaaaaattggtttattgtagcctgcatgaatcaatcggcaggcggaagaggctcttttattctgcggagtactaccgggaagccggagggaccttatgaaaatatcgaaggtaacgaggataaagccatttttccaaacattgacggaagcctgtttgaagatacggatggtaccgtatattttgtcggtcacaaccactatatagcacgcatgaaaccagatatgagtggtttggcagaagagataaagacattaaaagaaagtaaatactctccggagccgtatgttgaaggagcattcatctttaaatatgatggaaaatatcatttggtacaagctatctgggcacaccgcacggtgaagggggacacttatgtcgagaaggaagggttaactaataagaaaactcgttatagctatgattgtatcattgccactgccgacaatgtatatggtccttatggtaaacggtataacgcaattaccggcggcggacacaacaatctgtttcaggataaggatggcaactggtgggcaaccatgttttttaaccctcgtggcgcacaggcggccgaatataaagtgacatgtcggccgggattgattccgatgctttatgaaaacggaaaatttaaacctaatcacaattatcaggcaaaatgaaaacatcactattgataaccgggggattggctttcggagcaatgacttttgcacaagaaaagcctaatatcattgttatattggcggacgatctgggtttctccgatttaggttgctacggaggagaagtacagacaccggtattggataagatggccaaacagggtgtccgtatgacacaaatgtataacagtgcgcggagttgtccgtcacgtgccaatttattaaccggactttatccgcatcagacagggttaggacacatggatgcaacccgtccggcatggccgaaaggatatgccggctttcgttccaattctgacaacgttaccattgccgaagtattaaaagatgccggatatttcacagccatgtccggtaaatggcatctgggcaaaaccgccaatccgataaaccgaggtttccaggaatattatggtttgttaggtggattcaattctttttggaatccggacgtatatacccgattgcctaaggatcgtaacccacgtcaatataaagagggagaattttatgctactaacgtaataaccgattatgccatagactttattaatcaggcacatcaggaagaaaaacctttgtttctgtatttggcatacaatgctgctcattttccgttgcacgctccgaaagaagtaacggataaatatatgaagatttacctgcagggttgggataagattcgagatcaacgttggaaacgaatagtaaagatggggcttttgcaaggaaaaccagcattaagcccgcgtggtgttgttcccgaaagtttgtttgaggatgagacacatccgctgcctgcctgggattctttaacaaaggaacagcagactgacctggctcgccgtatggctatttatgctgccatgatagatattatggataccaatattggtcgggtattggatactttacagaagaacggtgaactggataatacatttatcatgttcatgtcggacaacggagcttgtgccgaatggcatgaatttggtttcgacaagcaaactggaacagaatatcatactcatgttggtgctgaattagaccagatgggactaccgggaacttatcatcattacggaaccggctgggcaaacgtttgttgtaccccatttacactttataaacattatgcgcatgaaggtggaatatccactccttgcattatccagtggggtaaacagattaagcacaaaggcagtattgaccatcaaccggcacaattctcggatatcatggcaacttgcatcgaactggcagggactaaatatcccgaagaatacgaaggaagaaagattgtacctacaccgggcaagtcaatccttcctattgtacgcggtgaagaaatgccggaccgttatatctatgcggaacatgaaggtaatcgtatggtacgcaaaggtgactggaaactggtctctgcgaattttagaggtgatgaatgggaactctataatatcaaagaagaccgcacagaacaacataatctgataaaggaataccctgaaatggcaaaggaactggaagacgcttattttgagtgggcagaccatagtgatgtgctttatttcccgaaggtttggaatacttataataaaggacgccggaaggactttaaagaatatagagataagtaggaaaacacagtaggaaagaaaagataggaacttatgaacaagaaactactaattgcagtatttgtaagtgctatggcacatacgttcgcttgcgcagcaagcccgaaagaaaatagaatgaaaacagtttgggctgataaagttacgtcggaaaatgtatggcagagttatccgcgtcctcagttacaacgttcgcaatggatgaatctgaacgggttatggcagtatgcggttactactcaggatacacctaaaaaagaagtgaagttcgagggacagattctcgttccgtttgctatcgaatcttccctttcgggggtgcagcgttcttttctgcctaccgagaaattgtggtatcagcgtaactttacccttgatgacgcatggaaaggaaaaacagtgattttgcatttcggagctgtagattatgaatgtcaggtatgggtaaacaacaaattggcgggcattcataaaggggggaataatcctttctctttcgatgtaaccaaattgctgagaaaaggtggttcgcaacttgttgaggttgctgttatcgaccctacggatacggagtcaatttcccgtggcaagcaacagttggagccgaaaggtatctggtattctccggtatccggtatttggcagactgtgtggttggaggctgtaaattcaacccatattcttcaggttcttcctacagctgatattcataaaaagacggttagtctggacatcagtgtagctaaagccaaaggaggagaaaaagtaaaagtggaattactggacgaaggtaaggtagtgggtacgacagagcaaaaattagcctcaaagatagaaatggaagttccggaggctgttctttggagtccgtcttctccgaaactttaccatctgaatattgagttgttaagtcaaggacaagtaatagatcaggtaaaaagctattttgcgatgcgtgaggtcagtatccgcaaagatgaatgtggttaccagcgtatttgtctgaatggtgatccaatattccagtatggaacactggatcaaggctggtggccggatggtttgctgacacctccttccgaagaagcaatgctttgggatatggttcagctcaaaaatatgggatttaataccatacgcaaacacattaaagtagaaccggagcaatattattattatgccgattcgttgggtttgatgatgtggcaggatatggtatccggcttctctaccgaaagaaaagacgaagaacatattaagcccaatgcgcaaacggactggaatgcacccgcatcacatactaaccaatggcaacaggagatgttcgagatgattgaccgtctgcgtttttattcctgtatcacaacgtgggtaatcttcaatgaaggatggggacagcataatacggtagaaatagtggaaaaggtaatggaatacgataaaagccgtatcattgacggagtaaccggctggacagacagaggagtaggccatatgtatgatgtacacaattatccgtctgcttccatgattttgcccgcttgtaatggcaatcggatttctgtcttaggagaattcggagggtatggatgggccatcaaagaacatctgtggaatcccggtatgcggaactggggatataaaaatattgatggagcaatggcgctgatggataactatggtcgtctggtctatgatttggagacattgatagcacaggggctgagtgcggcgatttatacacaaaccactgatgtcgaaggtgaagtaaatggtctgattacttatgaccggaaagttattaaaattccggaaggcttgttgcatatcatgcacgatcgtttatatcatgtcaatccggcgaaagtcattactttggtgcccgacgctcagaatgggagtgcggtcagccgtgcagtcagccttaacgggcaggagtcgaaaatgacctctttgcctttcgattgccctccccgttcggaaattgtgtcggaaacttcatttgatgtcaatgatgaattcagccatttgtctttgtgggtgcgtgctaccggagatgtgaaggtatggttgaatggagtggaggtcttttcgcaggaggtgaaacaaaccaggcaatataatcagtacaatatcagtaattattgccgatatttgcgaaaaggaaagaatgagttgaaaatcgaagtacgggaaactaaaaagatgagctttgatttcggtttgagggcttactgatcggacacgtttttattcccaagacttgcaataatttctcaaagaaggctgtcggtttctgaaagacttttatctttgcagatataatacatatggcgctatgagaaagattattttgattttcgtgacaattgtccttccctgtttgctttgcgcaagaaatgatgataagagtacagatatgctgcttcgtgagattgacggaattatcaggaaccgtcagacttacggtgcagaaaaagaagcacgtatctccgatttgaagaagttgctgtccgaggctacctccgatgagcagcgttatggattttgcggcaggcttttcgacgaatatcgggcttataatctggactcttcgtatgtatatgcacagcggaagcaggaactggcttctcatttgaacaaacaggattatctggatgatgccgccatgaatatggcagaggtgatgggaaccaccggaatgtacaaggaagctctggagcagttgggacagatagacaagaaaaccctgtctgattatctctatccctattattaccacttgtatcgtactatttacggtttgatgggagattatgccgtcaccgagaaagagaaaaaagagtattaccggatgacggacctgtatcgggattcccttttacagactaatgcctccgactcattgggtcatgtgctggtgatggccgacaaatgcaccgtacacgcccaatatgatcaggcaataaccatgctgaccgacttctaccggaaaccctctctggacgatcattccaaggcgatgattacttataccttgtcagaagcctatcgcctcaaaggagacaagaaagggcagaaacactttctggctctctcggccatcgctgatttaaaatcggcagtcaaagaatatgtttccttacggaaactcgcctctcttgtatatgaagacggagacattgatcgtgcatacaactatctgaaatgctcgctcgaagatgctacgctctgcaatgcccgccttcgtaccctggaaatctcacaagtcttccccattatcgatcaggcttaccaactgaaaaccaagcggcagcaacaggaaatgaagatatctttgatctgtatcagtctgctttccgtctttctgctggtggctatattcttcgtttacaagcagatgaagaaagtggctgctgcccgtcgggaagtgattgacacgaatacgcttctgcaagagctgaacggtgagcttcatgactccaattcgcaactgaaagagatgaaccataccctttcggaagctaactatattaaagaggaatacatcggccgctacatggaccagtgttccacctatctggataagatggacttataccgtcgttctctgaataagattgcggctgccggcagggtagaagagttgtataaagctattaaatcctcccaattcctcgaagaagagctgaaagacttctacgcaaactttgatatgaccttcctgcaactcttccctaactttgtggaagagtttaatgcgttacttgtcgaaccgatgcagcccaagcagggcgaactgctgaataccgaacttcgtatctttgccctgattcgtctggggattacggatagtaccaagatcgcccagttcctccgctactctgtgaccactatttataattaccggacacgtgtccgcaacaaggcactcggcgaacgggatgagtttgaggctaaagtaatgaaaatagggaaggtggaagagtaagaaatccactacttttttagcacgatcgctattctataatattcttattattagtgttttatgctgttttgtactgtataaaccactatatttttgctatctggcaaaagaagcgcatttaattgtggatacttttgtttcagtgaaaacaaaaagtaatcctaatattaactttaaattgatgtacatggaacagagtataaagtcgaaaggctttgaacatcgcctcctattaataatgtggggcttgttactatctcttagtgcattcgcacagcagattacagtaaaaggacatgtagtggacgccacgggcgaaccggtgatcggagccagtgtgatagaaggcaagtccacgaacggcacgattaccgatatcgacggtaacttctcattaaatgtttctgctaacagcgcattgaccatttcttttgtcggctataagacgcagactgtttcggtgaacggaaaaaccgcactgaaagtaaccttgcaggaagataccgaagtattggacgaagtcgttgtagtaggttacggaacgatgaaaaagagcgacctgaccggcgccgtatcttccgtaggagtcaaagatatcaaagactctccggtagccaatatcggtcaggcaatgcagggaaaagtatccggcgtgcaaattatcgatgccggcaaaccgggggacaatgtaaccattaaaatccgtggtctgggcacgatcaacaacagcaacccgctggtggtgatcgacggaatccctaccgacttaggtctgtcttctctgaatatggccgatgtggaacgggtagacgtgctgaaagatgcttcggcaactgccatctacggttcgcgcggtgccaacggtgtagtgatgattaccagtaaacgcggtgccgaaggcgccggaaaggtaacggtcaatgcgaactgggcgatacagaatgcaactaaagtgcctgatatgctgaatgccgcccaatatgcagcattgagcaatgacatgctctcaaacaatgacgataacaccaacccttactgggcagacccttcttcattgggaaaaggaaccaactggctcgacgagatgctgcgcacgggagtgaagcagagttattcggtcagctattccggcggcacggaaaaggcgcattattatgtgtccggaggttttctcgatcagtccggcattgtgaagagtgtcaattatcgccgtttcaattttcaggcgaacagtgacgcccaagtcaacaaatggctgaaattcaccaccaacctcacattcagcacagatgtaaaagaaggaggaacatacagtatcggtgatgcgatgaaagcccttcccacccaaccggtgaagaatgacgacggcagttggagcggtcccggacaggaggcgcaatggtacggaagtatccgcaatccgatcggtacgcttcacatgatgactaacgagacgaaaggatataacttcctcgcgaacatcaccggagagatcaccttcactaaatggctgaaactgaaaagtaccttcggctatgacgccaagttctggtttgccgacaacttcacgccggcatacgactggaaaccgaatccggtagaagaatcttcccgctacaaaagcgacaacaaatcattcacctacctgtgggacaactacttcgtattcgatcatacttttgcaaagaaacaccgtgtaggtgtgatggcaggttcttccgcacagtggaataactacgattatctgaacgcacagaaaaacatcttcatgttcgacaatatccatgagatggacaacggagaaaagatgtacagccttggcggcagccagagcgactgggcactgctttcactgatggcacgtctcaactactcatacgaagacaaatacctgctgacggctaccgtacgtcgtgacggctcttcccgctttggtaagaacaaccgatggggaacattcccttccgtatctctggcttggcgtgtttctcaggaagactggttcccgaaagataacttcctgatgaacgatctcaaactgcgtgtcggatacggtgtgaccggtaatcaggaaatcggtaactatggatttgtcgcatcctacaacacgggtgtctatcctttcggaaacaataactccactgctttggtatctaccactctctccaatccgaacatccattgggaagaagtgcgccaggccaacttcggagtggacatgagcctgttcgattcgcgtgtcagcctttcactggatgcttatatcaagaatacgaacgatatgctggtgaaggcttccatccccatcacttcgggctttgaagatactaccgagactttcaccaatgccggcaagatgcgcaacaaaggagtggaaatgacattgcgtaccatcaacctgaaaggcatcttctcctgggaatccgctttaacggctacctacaataaaaatgagattctggacctgaacagcgaaactccgatgtttatcaaccagataggcaattcatacgtgaccatgctgaaagccggttacccgatcaacgttttctatggatacgttaccgacggtcttttccagaactggggagaagtcaaccgccacgccacccagccgggcgcagctccgggggacatccgcttcagagacttgaacaacgacggagtgattaacgacgaagaccgtacgattcttggcaatccgaatccgaactggttcttctcactctccaacaacctatcttacaaaggatgggaactctccgttttcctgcaaggagtggcaggcaacaagatttataatgccaacaatgtggacaacgaaggaatggctgccgcctacaaccagaccacagccgtactgaaccgctggacaggagaaggcacaagctactccatgccgcgtgccatctggggcgacccgaaccagaactgccgcgtatccgatcgatttgtggaaaacggctcgtatctccgtctgaaaaatatcaccctttcgtatacactgcctaaaaagtggttgcaaaagattcaactggaaaacgcccgtatctccttctcttgcgagaatgtggcgactatcaccggatattcgggcttcgaccccgaggtggatgtcaacggtatagacagcagccgttaccctatctcgcgtacattcagtatgggcttgaactttaacttttaaatcaggaggaagaaaatgaaaaagaaactgacttttataatgatacttgtcgtacttgccttgacatcgtgcagtgattttctggataagtaccccaaatacggtgtggaccccgaatcggaagtgaccaatgagattgccgtagcactgactactgcctgctataagacgttgcagtcgtccaatatgtataatcagcgcctgtggagcctcgacatccttgccggcaacagcgaggtaggtgccggaggaggaaccgacggactggaaactgttcaggcggctaactttatagcgcagagcgacaacggttttgccctgtacgtatggcgttctccgtgggtaggcatcggacgttgtaatatcgtgctttccaatctgccttcggctgccatctccgatgagataaaagatcgttgcatgggtgaggcatatttcctgcgtgctcattactactatatcctcgtccgcctttatggtggcgtacctttgcggttacagccctttgagccgggacagtcgacggatattgcccgcaatacggtagatgaagtatatgcgcagattctatcggactgtaagaatgcggtggatatgcttcccccaaagagcagttacggagaaaatgacaagggacgtgcctgcaaagaggcggcgatggctatgctggcagatatttacctgacgctggcgcccaatcatcgggattattacaatgaagtcgttacgttgtgcgaccagattactgcgatgggatatgatttgtctcagtgcaagtatgccgataatttcgacgctacgatcaataacggtgcggaatcccttttcgaagtacaatactccggcagtacggaatacgatttctggggaggggacaaccagtcttcctggctgtcgaccttcatgggaccccgcaactccggcatggtggcaggcgcttacggatggaatctgcctacggaagaatttatcaaagagtacgaagcgggcgatttgcgcaaagatgtgaccgtgttatatcaaggctgtcctgctttcgacggcatggagtacagacgttcgtggtcgggtacaggttacaacgtccggaagttccttgtgtcgaagaccgtttcgccggaatataataccaacccgaataacttcgtggtataccgttatgcggatgtcctgttgaagaaggcggaagccctgaacgaactgggacatcccgaccaggctgccgcacctctgaatatcgtccgtcagcgtgccggactggcggatgtgccgactaccttgaatcaggaaacaatgcgggaaaagattattcacgaacgccggatggaacttgcttttgagggacatcgctggtttgacatgattcgcatcaataatggtaactatgcgattgagttcctgaaatccatcggcaagaatcaggtgacgaaggaacgtctgctgctgcccatcccgcagacagagatggactctaacaatctgatgactcagaatcccggttattaatcgcctttacaatcattcatttagacagatcatatgatgaagaaatatatatatcagatgttgtgctctcttttcatcggcggagcgatggtttcctgcgccgaggattatatggagacggacaagggacatgatacgctgactcttacggtgaatcagcaggagatcgtattgaacgaaaagaatcacagtcaggaggcgttaacgctttcatggactacgggaacgaactacggaagcggaaaccgtatttcttatacactggaaatagccaaggcgggaaccgacttcgcccgtgcctattccgtagatttaggaacgggaacttatcagtggacgaagaaaacggaagaactcaatcagtttctgaacacgcagctaggcgtcggctatgccgaaaaagtatcgctggaagcacgcattaccgctactgttgccggaatggaagaaaaggagcagcgtgccacagttgcgctggatgtgactacttatcaaccggttactccgacgctttacctcatcggagaagctgcccctaacggatggagcgccgatcaagcgacgcctatggagcgcacggacaacggacagtttacgtggacaggaaagctgaataccggtgtattcaagtttataacgacattgggagaatttcttccatcctacaaccgggatgccgctgccggagaagaactacggcttatctaccgcacatcgggcgacgaaccggacgaaccgtttacagtcagcaaggaagcgacctatatagtcaaggtagacctgctcgacctgacaatgaccatgaccgaaacggaaaacatcggatggcgctttgaagaattctatattgtcggctcctttaccggcgacaatggctggggattcgaggcactgtctaaagatgccgttcagatgaatctgttccattatggtgccgtgattccgtggaaggcggacggtgattttaagtttacttccgtgacggacttcggtcagtcggatgctttcttccatcccaccgaagggaacgctccgtatacttccacttcagttgtactgggaggtgaagacaataaatggcaaatgaaggaaagcgaatgcggcaaggcctataaagtgctgttcctcacagccaagggaaaggaaaagatgctgatgcgtccgtttaccccctacgaaggactgtatctggtaggcgatgccactccgaacggatggagcatcgacaacgccaccccgatggctaaaagtgccgacagcccttacatctttacctggagcggtacactgaatacaggggagatgaagatttcctgcgacaagcagtccgactggaacggagactggctgatggcggacaagagcggaaaggcaccgaccggtgaagtggagacagccttatttaccagtaaaacggatgcggaactgaagaatatgtatccggatacagacctcggcagtctggacaataaatggaatattcaggaagctggctcgtatcggattacgattgaccagttgaaagaaacgatttcaattgtaaaacaataaacaagtattcaagatgaagaagataatatatttggtggctgccttcctgtgtctgtcttgcagcgacgatcatgaatcgaacccacagaacggaggaacgtcgggcagtgtgaccgaagtaactccggtgacatcggacttatgcgtggaactgacaaccgacaaggctttttataaaccgaacgagacagtgactttcactgccgccgatgccttgcccgccggaacaaaggtacgctatcgcctttcgggagaaatagtcggagaagaaccggtcagcggtacgaactggacatggaaggctccttccaccgatttcaaaggatacatggcagaactttaccggcaggaaaacggtacggacgtcatcgtcggtacgattgcggtagatgtatccagccatccggcacgtttcccccgatatggcttcgtggcagatttcgacggagacaagacagaagagaaaacgctggaagagatggcctatctgaaccgccatcacatcaactgggtacagtttcaggactggcacaataaacatcattggccgctgggcggcacacgcacgcagttggacgaggaatatctcgacattgcgaaccgccctgtccatacaagctctgtgaagaattatatcaaggcacaacaacattttggaatgaagtccatgttctataatctttgtttcggggcattgaaggatgcggcttccgacggggtgaaagaagaatggtatctgtttaaggacgcttcgcataccacgaaagacagtcacgacctgccaagcggatggaagagcaatatctatctggtagatccttccgacaaggaatggcagcaatatatggcggaacggaatgacgacgtgtatgcgaacttcgccttcgacggctatcagatcgaccagttgggcaagcggggaacgctttacaactacaacggtacaccggtcaacctccgcgaaggatatgcttcttttatcgaagccatgaagcaggcgcatcccgacaagagtctggtgatgaatgccgtaagccgctacggtgcccgtcagatcggagaaaccggcaaagtagatttcttctataatgagatgtgggcggatgaggcggactttacccatctgaaagccgtcctgtatgaaaacggagtgtatggcaataatcagctgaatacggttttcgctgcctatatgaactataataaggcggatcatcggggagagttcaatacagcgggtatcttgctgacggatgcggtgatgttcgctttgggtggctcgcatctcgaactgggtggtgaccatatgctgtgcaaagaatattttccgaacgacaacctgacgatgagcgaggaactgaaaacggcgatggttcattactacgacttcctcacgtcttatcagaacctgctccgcgacggcggaacggagaacagcatcgctatgaactgtaccaacggagaaatgaaactcaacgtatggcctccaaagttggggtcggtcactacctacgccaagcaggtagacggcaagcaagtagtgcatctgcttaacttctcgcaggcgaacagccttagctggcgggacgtggacggcaccatgcccgaacctgccctgatcacgaaagcggccttgcagatgaacctgcccgccaaagtgaataaattgtgggtggcatcgccggacgtacacggaggagctttgcaggaactggcatttacgcaggagaacggggtagtctccttcacactgcctgccttgaaatactggacaatgattgtagctgaataaggcagttgcaacggaataactaaaacgataggtatgaagattagatataagtttggggtgtggatgttgtgtctgatgtttccggcgttggtctgggcagaaaacgcaaaaagtatatgtacctcttttacgcagcagggtcgtcaggtgacttttcacctggcggacagtgccgcgctgcaactgcaactttgcagtccttccgtggtaagaatctggttctcgccggacgggaagctgcaacggagaaacgcttcctttgccgtgatcaatgaagaactggaagatgtgggaacggttcatgtggacgaacaggccgcctgctatgagatatttacctcgaagctgcgcatacgggtgaacaagtcgccgatgagcatccagatattcgacaaatatcagaaactcctcttcagtgactatgccgataaaggacacgtaagcgaaggcacgaagaaggtggaatataaaacgcttcgccgtgacgagcatttcttcgggcttggggaaaagaccggcaagatggaccgcagaggagaatcttacaagatgtggaacagcgataaaccttgttacagtgtggtggaagaccctctttacaagagcatccctttctttatgagcagttaccggtatggtattttccttgataatacgtataagacagaatttaagttcggaacggaaagccgtgattattacagcttcgaggcgccggacggggagatgatttactacttcatcttcggcaaggactataaggaaatcctgagtcagtatgtaggactgacgggcaaacctatcatgcctccgaaatgggcattgggctttgcgcaatgtcgtggcctgctgacaagcgagaaactgagccgcgaaatagccgaaggctaccggacacgcggcatcccctgtgatattatctatcaggacatcggctggacggaacatctacaggacttcgaatggcggaagggcaactacgggcatccgaaaaagatgcttgccgacctgaaagaaatgggattcaaggtagtcgtatcgcaagacccggtcatctcgcaagccaacaagaagcaatgggaggaagcggaccgtctgggatattttgtcaaggacagcacgaacgggaagagttatgacatgccgtggccttggggcggaaattgtggggtagtggattttaccttacctgccgtagccgactggtggggaacctatcagcagaaacccattgacgatggcatctccggcttctggacggatatgggagaacccgcatggagcaacgaagagcagaccgaacgccttgtgatgaaacatcatctggggatgcacgacgaaatccataatgtctacggactgacttgggataaagtggtcaaagagcagttcgagaaacggaatccgaaccgtcgcgtctttcagatgacccgtgccgcttatgcgggattgcagcgttatacgttcggttggacgggagattgcggaaatggagacgatgtattgcagggctgggggcaactggccaatcagattccggtgattctttccgcagggttgggagtaattccgtttactacctgtgacattacggggtattgcggagacatcgaagactatccatctatggcggaactttatacccgatggatacagttcggtgcattcaatcctttgagccgtattcatcatgagggggataatccggtagaaccgtggctcttcggtccggaagcggaaaagaacgcgaaggaggccatcgaactgaaataccgtttattgccttatatctatacgtatgcccgcgaagctcatgatacgggattgcccatcatgcgtcctctctttttggaatatccggcggatatggaaacgttctctaccgatgggcagttcttgttcggacaagagctgctggtagctccggtggtgaagaagggggcacgtacgaagaatgtctatctgcccgaaggcacttggattgactacaacaataaacaaacagtctataccggagaacagtggactaccgtggaagctcccttgtcgtgcatcccgatgtttgtaaagcagggttccatcatccccaccatgccggtgatgaactacacgcatgagaaaccggtctatccgctgatctttgaagtatttccggcaaggaaaggagaggaggcctcgttcactttgtacgaagatgagggagaagacctcggctatcaacgggatgagtttgccaaaactcccgttcgcttccggacggaggagggtggttatcttctttcggttggtgcccgtgaaggaaaagggtatgcagtgcccgctccccgaaactttattttccgtatgtatctgaagacggctcccaaaggagttaccgtgcaaggtaagaaagtaaagaaggtgaagccggaacgtctggaagagaatccggacgatgacactgaaagtatggtgtggagttgggataaggcgaccggtatttgcagccttcgtatgccggaccgaggggaagaaagtcggatttccctgcgtttatgacttgaactcaacgcctacataaagatataaatttgaagaattgctgtcatctgtcactaaacctgtgacaatagtctgataattaaatcataagaccgtgacagcaacctgtgacagcagcgtgacggaaagatttgccgtcacgctgtcattcatttcagctattaataagccgagtttgttttaaggtatgaaactacagttcccattgcttgaaactttggttcccattacttgaaactgtagtttcaaaggtttgaaaccaaaagttccaagcgtatgaaactatagtttctcaccgatgaaactctggtttcaagcagtgaaactgtacttccctaataatggttggcttgtttatgtctaatagctgtactggccgaaatcaattgatgaactcgtaatccgtcagttggtatcttttctgcttgtattcttttgtccttttaagttttacctttccttttgcagcttccagcgttacttcgttgaattgtcctttttggaaatcgtaacttataccgtcatcttcgagaaggaggaacgttgccgaaggagcgccgtatactttgcaatgcaaattgaatacagtttgagcatccacataggggacaggtgcggccaatggcaataacgttccctggcggacgtagagtggcaactgatctaattccgtcgtaatctcatattcacggttgccttcatatttctcattggtattgaagttgtaccatgttccttcggggaagtagaccgttctcgttttcttgttctgatataaaggagcagccatcaatccgtctcccatcatatactggtcactgatggtgcgcaaatgttcatctttgggataatccatcaatagcggacggaagggaggtactccttctttataatatgtataaaaagcactgtacagataagggatcagctgcatacgcagattaatcagtgtgcgggcatattcttcatacctctttgcttccggcaggaactcgccacgttcgttctttccacggtcgaattgcagccacggagcgtattgcagataccatgcattgaccatagcctgcggagaaagaatcaccgtttgcagacgatggaagaaatcttcggcagaatgtgcctcacgcacttcgggacaccacaacagtcctccgaatgccgagttgcaaagtgcctgaatgtactctttgggatcgtatgtatcactataaagtacggcgttgcgtgaagacatgaacataccggacgaccggtaatcctgataggtgcgggtattcttttcacgatagatactgtccatcgcattcacataaagggaaccgaatacctggtgcatcttttctccgtcgatgcccgaagggaactgtgccatatccgggaagcaccatgtggcggaagcaaaagatatgttcgagttgtcacattcgtccagtttgaagccggagatgccttcttctatcagtgtgcggtggtaatcggtaaatattttgtgtgcttccggctggatgaagtccggtaccagtccgttccatacaaggaaatcgcctgagtagggctccagcgccttccggatgggggaagaaggatgaacatacgcgtgttcccacaggtttactttgtatcctttctgctgcaactggtccagcatttctttgtgccttgggaaacggtcgtcgctccagcgataagaacaggagtaagtggccgtctgccatcccggttcgagtcccagtacgtcgcacggaatctgtttctcgcggaaatagttggcaaaacgcatgacggagtcctgcgtcgcatctcctttgacacggtatttgaatccgagtccccacatcggaggaagacatccgccgccggagaggaggttgtatctcttgactacatccagcacttccggtccggtgatgataaatacctcaatgcctttggcgccgggtacgtcgatatggactttatttccgttgcttctgttcttatacaagtcttccgtggtggtagcaatgtgttttctttcttccgtttgtagttgacgactatgctcggttttctgattggagccgcataggaaagtggtataccgtgccgtgttgaccagaataccgtaccctttggtagagacgtagaatgtctgcggagcatgtgtatatccgagtccgttcagcggattgtcgtttactatcgggcgcttgcgcaggccacgctgaccgaaagtttcgaattgaagtccgaaaccgtatatttgttcgttgtcctccagagggacttcgatcagacagccacggtcggttatctttatttgtacttcgtcggggctgaagggcggctttgcagccggaagttgtttcattgcttctacggcaggtttcccgccgaataaggaataaggggtaaaagtgtcaatttctcccgcttgcagcttgatgattcccggagcaatttcttcttgagcggatgcttgcccggcaaacaggagacctactgtggatagaaaaaggttgagtaatagttttctcattatagtttattttatcatggttatattaaaatagacttttgaaatgcgattttccactaaaatgcaataaaagaatattgcaaatataggaataaaacagatgcggtatcaagtattaatacctgagaagtcagataaagtgacctgtcatgacatatattaatgtttgtgacgggagatattaatatcttctttttttgaccgtgattctaaaaataaggttttatatttgtccttgtttaagaatgaaaaagaataaaaccatgaaaaagaattgttttctccttctctttttgctttgtgcctgcctcgttcaggcacaggatacgtatcgtaccgacaaggatgtaccttacatttccggctccgaaacagatgcttatcgtctggaacgttgtaaactggatgtttattatcccgagaataaaaaagatttttccaccattgtatggtttcatggcggtggtatggaaggaggaagtaaatttgttcccaaggaactgacggatcaaggctttgcagtagtggcggttaattatcgtctgagtccgaaagcaaagaacccggcttatatagaagatgccgccgaagctgtggcatggacattccggaatatcgaaaagtatggcggtcgcaaggatcgtatctttgtttccggccattcggcgggaggttaccttacgttgattctggcaatggataagaaatatatggctgcatatggagccgatgcggatagtgtagctgcctatcttcctgttagcggacagactgtcactcattttaccatccgcaaagaacatggcctgcccaacggaatccccatcattgacgaatttgctccggtaaacaaggcccgcaaggataccgcccctgttgtgctgattacgggggataagaatctggaaatggctgaccggtacgaagagaatgcactgctggcatcggtattgaagaatatcggcaatcggaaagtctctttatatgaactgcaaggatttgaccacggacaggtacttggtcctgcctgctatctaattgttaattatgtgaagaggttcaaatgaaaaatacaggtcatttaaggaaaatatctgtgaaatgtaacgtttctcatagtctgtgaatcatttattatatcagaaatcggtcgtattggctacatttactccgattttacaaactaataaataaaatagctatgaagacattaagcagaactgtacttactctttttgttttgtccttctcctgtttggcagcgatagccggagaagtatcttttaaaataaccaggcaatatctgaacttccccatctcccataaagagaatagaggaagaatgacttttgaagtaaacggcaagcaagatttatccgtcgttatccgtctggcaccggatgaagcggaatactgggtgtttaaagatgtgtcggctttcaaaggaaagacgatcaagataacctacgacggcaatgagaagggattgagtaaaatataccagtccgacgaaatcgaaggacaagctgaactgtataaggaaaagaaccgtccgcaattccacttcactacccggagaggctggatcaatgaccctaacggattgatctattatgagggcgaataccacctgttctaccagcacaatccttttgaaagagactgggagaatatgcactggggccatgcggtcagcaaggacttgatacactggacagaattaccggacgctctgtatcccgaccatttaggaacgatgttctccggttcggcagtcatcgactatgataataccgccggattcaataaaggcaagactccagccatggttgccgccttcactgccgccagcagtgacagacaagtgcaggggatagcctacagccttgacaaaggacgtaccttcacgaagtacgacaagaatccggtgatcaactccaaggagaaatggaactctcaggacacacgcgacccgaaagtgttctggtatgcgccctccaagcattgggtactggtactgaacgagcgcgacggacactccatttatacctcttccaatctcaaagactggaaatacgagagccatgttacaggcttctgggaatgtcccgaattgttcgaactgccggttgacggtgacaagaaccacacgaagtgggtgatgtacggtgctaccggtacgtatatgctaggctctttcgacggcaaagtatttactcccgaagccggaaaatactgctataccaccggaagtatctatgcagcccagacctttacgaatattccggcaagtgacggcagacgtatccagataggctggggaagaatctcccaccccggtatgcctttcaacggaatgatgatgctccccaccgaactgactttgcgtaccaccaaagacggcatccgccttgttaacgttcccgtaaaggaggtcgaatccttgtgtaagcctcttcgttcctggaaatctctttcttcggatgaggccaaccgccacctgaaagagttttatgatgccgactgtctccgcattaagacaacgatcaaactctctcatgccacggatgccggattcaaccttttcggccagcgcatgatcggctacgacatgaactccaatactttgaacggtcgtttctactctccccaagacccgaccagcatggagttgagtgccgatatttacattgaccgcacctctatcgaagtctttatcgacggcggactgtattcttattccatggaacgccgccctgataccaacaacaaagagggactccacttctggggaaaccgtatcgaagtgaaagacctgcaagtcttttccgtagaatccatttggtagacggaaatcaaaagctatctttgttttcagttatttaaataggaaagagaatatgaaaacgcgtagtcaagtttttcagtttgagaaagagttgaaatgggagcaccccgctccgggaatccgtcgtcagataatgggatacgacggacagttgatgatggtcaaggtagaatttgagaaaggagcggtcggtacgttgcatgaacattaccacagtcaggctacctacgtggcaagtggaaagtttgaactgaccatcggcgaccggaaagagatactgtcgaccggcgacggctactatgtagcacccgacgaaccgcatggatgcgtctgtctggaggccggggtattgatagacacattcagtcccatgcgggctgattttctggaatagttcctgatgaatggtaggttaccggataatgatggtataaatttaccacatatatggtatttcctgtcaacaaaaactgcactatctttgtaatatcttaaaacaaaggaaattaaaaacagatatatatggaaaagattgcaaggaaattgacggatttggtaggtaacactccgttgttggaactaagtaattataataagagtaacggcttgaaggctcgcctgatagtgaaaatcgaatcattcaatcccgcgggcagtgtaaaagaccgcgtggcattggcaatgattgaagatgccgaagtgaaaggagtcttgactcccggcgcaacgatcatcgagcctaccagtggaaatacgggagtaggattggcattcgttgctgccgccaaggggtacaagctgattttgacgatgcccgatacgatgagcgttgaacgtcgtaaccttttgaaagctctgggagcggaactcgtgctcactcccggtgccgacggaatgaaaggggcgattgccaaagcggaagagttgaaagctgccactccgggcagcgttatcttacagcaatttgaaaatcctgctaatcccgctatgcatctacgcactaccggactggaaatatggagagataccgaggggaaagtcgatatcttcgttgccggtgtaggtactggcgggacaattagcggagtaggagaagcattaaagatgcgcgatcccagtgtgaaggcggtggcggtagaacctgccgactctccggtactgtccggcggaaagcccggacctcacaagattcagggaatcggtgccggtttcgtaccgaagacttataatgcttctgtcgtagatgaaattattcaggtgcagaatgacgacgctatccgtaccagtcgtgcgctggcggaaaaagaagggctgttggtcggcatatcttcgggagcagccgtctatgcggctaccgaactggcgaaacgtcccgaaaacgaagggaagatgatcgtagccttattgcccgatacgggagagcgttatttatctactatcctgtacgcgtttgaagagtatcctttgtaaaggaaggacattgatttgaaaaaaggaaataagaaacagagaaaggaaggtatgtcaaaagcctattgtaattaaactgagggtgtacttcattcacaaattgaagtgcaccctctttctttaattagaattgataatgatatctttagctgataaatcttatgccaaaccctggtgttatattaggtgttagtcgtccacgttccaatttgtaactagaggtatcaacatctgtagagaaacatgttactccttcaatagtagggacattgccataagcggctgctaaatgtgaactatagcatgtctttattgcatcaccccaggaatgtggagatgccatcatgccgatattttttaattggggcattaatttacgccaacgagtgaatccgtaacctaatacgtcttccagatatacgtccagtagctgtttctcaccaagtttgaagttgagttctctgtcgggatttgcttctccgtctcctaatagagtattacgtcgtccattctttaaacaccactcttttagtttggtataatcttcgtatgtctcccggaacggttcttcaatccagaacagaggaatattttctataccctttagatattcgatgaaataatcaaatgtgaaggcatcattaccatctacaagaatatcacaatcaggaaaattgtcataaataagttttgttacagcaatatctgtttttagtccttcgtctttggccatccatttgccccctcgtcctatttttactttaaactgacggtaaccataattatagtcataaaggcagttctctaatattttattcagtccggcagggttttcaataggatccatttcatcaaaatagatcataccagaatagcaggatgttaatatcgggcgatcatttccactaatgagcgcatacacaggtttattaagaattacccctgccaaatcatgcaggcagatatcaaatatataattttctttatttaatgtaccaatagttggtgcgaacaaatcagcaacactttttcctttaatagttggaaaaaggctttccgcagttttgcggttaccattcataagcccgattccttctgcgcctttatcggttgttagtatgcagaatgttaggtttggacctgttccatggtgacctagacgtgaatttttgcctacaaggcgtgggtattttaattgggccactttaaatttgatatctttaattttgtggtatgctaactcgttttttgttttctgatctccatagatattattggcaaaagccatggaaggtatgacactggcaatagatgcagtagctgctaattttaaaaaatttcttctttccatcttattctatattaaatgttttattatcgaatcttttctattcgggaaaataggtaatcactcaatcctgttatctgtattccgatgcgagcatacagaacaggatctgatatgttactgatgtccatttcaatctgcatgtcttttaagttagaaatattctgtatgtttactctattaatagaacttacatcatcaacaaattgagtcttgtttactaaaagaaaagcagtgctgatcttggctccatctgttattttctcgatatcgaagtttgccttcagtgtattaccattgatggaaaacttttcattctttatcaggtagtaaggttctacagggtattcacaggttgtatttccttttacagttagataaacagtgtcccggtggtttacccatggtccgtttttatcacgtgttattagtttataatcaccatcgaacagtaatgcctggaatgatccatcttgagtaacatatactggaatagggtctttttttccaaacccttcttgatatagttgcatctggattttttttccactgcctcttactcctatatattcattattgtaggtaactttaccacttaacatagatgccggttcatcgaaattgtcaaagcgattacagctatgcagagatagaagacagattattgacaatatgtaaataaaatgatgtttcatatttatataaataagaggattattgatatggattctttgtcaaattcggattattattaatccaaccttgatctataaaattatagtagtttcgtaactggaagttacggggataaggagccatataagctttctttttttcgaaaacccattttccatctcttgggtcacccggttggtgaatgacgtatggaaataatacatactgtacagcatcggaattattttcatctccgtcccatagcttgtgtgctattctccaacgctttaagtcccagtaacgctggttttcaaatgcaaattctactctgcgttcacggatgatatcattaagggttactgactctaggggctgtatacctgcccttgatcttacttgattaatatatcctagtgcagaaggatcatttagttccattgccgcttcagcagcagtcaataaaatttcagcatatctgaattgtacgtaccatacttcgctgcctcgcgagatagtaccagctgaggctgtttcatctaagaacttacgaatattgaaaccgcttttattgatgttgttgtcactattttctacaggaccatttaatgcggtgatagtgttacctgcctcgtctgtagtgccacaagtgcttgtttctgttttccatgctccattttccagatattttcgtccagcctggaagataacttctttgcctttgaattttgctccaggatagatgactgttccataaagacgggcgtctttttgtgcaaaagcgtcttcagccttatcataatagatataatcaccatcattagcatgggttttgatacttccatcacgatcgttagcatattcaaaggcttccactaaattcaaaataggtgtcataacacttccaccttggtcttctttagctgaaatcatgatattggaagtagtaaactgatgagtcagtcccggatatttatagtctacagcccaaataacttctacattattttctttaatagtgacagcattatagaaattaacgcctttgtccgcctctgtttcttgtaattgatatttcccaccttttataacttcccgacaggcttttagggcagtttcatagtagcctttagctttatttgcatcaatgccaatttcattcttgtctgttcggatgggagcctccataagattgttatatttggctatagatgcagcatatatggccgctcttgctttaagtgctaatgctgcccactttgtagctcttgctgcattaattgagggagcctccgggagcatattgttgtcaactatcgctgtacattcattgatgacgtaattgtaagattcttcttcggtggatctgggtaaacgtaatgtttctatgtccattccgggagtatattccataatttggtcaccgactaaaggaattcctcctaagccacgtatcatattaaaataagtccatgcccgtaaaaaacgtacttctccttccaattgtaccttttccgaggtttccaggtctgagtttcgtatactgcgtaataactgattgatgttgcgtattaaagtgtaaggatagatacgccataaatcatttgcaaattcattggtttggtcaggtccaccattggaaagacaagcttcatctaagtagatgaaggacttgctgtcttccagcttttgtccccatcgggctcgtccatagatatttgccaatgcggattttatcattttaggatcattaaaaacagcttcgtccgataatagctggtcaggttctctgtctagaaaatcggaacaagaagtaataggtagcaaaattgccagtaaaaggaataatttgtatcttttcatatcattagaattttatgttaaaacctaaactaatgagtcgtgttgtgggatattgtataccagaattggaggttacttcagggtcaatgccatctatattcgctaaatagaacagattttgtcctgatagatatacacgaatgttttgtgatttgagaagtttgttaacagtctctggtagagtatatcccagttcaaaattctttaatttgatgtaaatcacattatgtgtccaaaatgaactcttccaataattgctatggctacttttacctgcgagcatcgtagggtatttgcctggtataagtgtactttgaggatcagaagggtcactcaaatgccattggtcttcaagcataaattttgcggagtttccgccattagtgaatgggacgcgtaattctctgtcttgtgtccatgtggtacaacttgctccggtgaaatccatagccagatcaaatcccttccattggaaagcaaaattaagtccgaagttgaaggccggtaggctgccttcagtatatccgataggacgttggtccatttcattaattaccttatcaccatttacgtctttgtatttaatgtcacccggacgaagggttttatttccttgttggtcgttatcaattgggtatgaagcaatttcttcccatgattgaaactgaccgataacttcatatccccagctaatggaattcatccgatgatatttggagttacggtattgatcccatgaattaccgaaaataggtttgtattgttcccaatcaagatgccttgagtaactgaagttaccaccaatggaataggataaatcgcctatgtgatgattccatgtaagggctccatcgatacctctatgtatgtccgagtttaaattttctttcggaagatcgaagccggcttcgtctggaataagtacatcatatcttggagcaggtaatccggtacgttttctgttaaagaaatcgaaggaaccggtcaatcggttgttgaacaacccaaaatcaataccgatatcgaataatttggctttaatccaagacatgttggtcacaggtaatccgcgtggttcagcacctatataatattctccgtcaatgacagcacctgttttattatagttatatccatccagataatcaaaagctgcataaccgcttacattatcatctcccagtaaaccataagaggctcttattttcaggtcattgagaattggtgacaataaactacgtttccagaacccttcttccgatattctccatccggcagagatagaagggaacaggccccatcgattgttaggtggaaatttccaggacccatcgtaacgggcagatacttccaacagatatttttgtgcataattgtagtgtatgcgtccaatatatcctaaacgtgcttctgtcatattcccgtgatcattgaatgtatccattgtttggaagtcaaacaaatgtaatgaattagaggctggaacagcatgaatatcaaaatatggattatcttttttaaaggattccacacttgcgacggcatcaattccatgtaacccgaaggttttgttataagtcagctgcaattgtccttttaactcttctttgcggtacacgtttcttttcaataccggattattcatactgaatactaccggatatgtatctgtcttttcgtcatatccgtatagcttataagtattttcttgtgtatcagcatatttttgtgaataaaaataagagaataatccttttagcttcaatccgtttaagatttcatattcagcagtgaaattaagttgggcgacccggaaggtttcttcggattttcctgaaatatcataatttattttctgcaaagttactacaaaaaagtgaaatgcggaaagatatagtgatagaattgagttacaagggttttagttgaagtggcgaaaattcgtgaagccattacaatccctgccaaagccaaatcctgacgccgcaacgttacttgttcgtaaccatgcccgaaaatgcgacaaacgggtacggatgacgaaacaagacgctaaggaatagtgagttaccgacaactcacgcgaaaaatttgcttacggaaaaagattgcgccgttcctccccgttttgcgtaccgacaccggactcttcaccaactaattttgaaaccaaaaaaattaaggacgatgaagagtacattttcagtaatctactatctcaagcgtcaggtagtgaaaaaagacgggacagttcccgtcatgggacgcatcacggtggacggcagccagacgcagttcagctgcaagctgactgtcgatccgaaactgtgggacaccaaagggggacgtgtcacgggcagaagcacggcggcactcgaagcgaaccgtatgcttgacaaaatgcgggtacgcatcaacagacactatcaggaaatcatggagcgtgacaacttcgtcacggcggaaaaggtgaaaaacgcctttctcggactggaacaccgctatcacacgctgatgcaggtgttccgccagcacaacgaggactatgagaaacaggtggaggcaggcatgaaagccaaaggcacactggaaaagtaccgtatcgtttacaagcacctgcaagagttcctcgacatccgctaccatgtgaaggacatcgccctgaaagagcttaccccggctttcatctccgacttcgagatgttcctgcgcacggacaagcactgttgcaccaataccgtctggttgtacgtctgcccgctacggacgatggtattcatcgccatcaacaacgagtggctgacgcgcgacccgttccgcgagtatgaaatcaagaaggaggaaacgacacgcagtttccttaccaaagaggaaatccgcctgctgatggagggcaaactgaaaaacgccaaacaggaactgtaccgtgacctctacctgttctgcgctttcaccggattgtcattctcggatatgcgcaacctcacggaagagaatatccgcacctatttcgatgaacacgagtggataaacatcaaccgccagaaaacgggcgtggtgtccaacatccgcctgcttgacatcgccaaccgcataatcggcaaataccgtggactgtgcgagaacggcaggatatttcccgtcccgcattacaacacgtgccttgccggtatccgtgccgtcgccaagcgttgcggcatcaccaagcatatcacgtggcatcagagccgccacacggcggccacaacggtatttctctccaacggcgtacccatcgaaacggtcagttctatgctcggacacaagagcataaagacaacgcagatttacgcgaagataaccaaagaaaaactcaatcaagacatggagatccttgcggcaaggttgaacggcattgaggaatttgcaggttgtaccatctaaaaaagagaagccatgaagcgtgacataatcatcatagaggacaaggcggtcagcgtaaccggtaacgaagtgtggatgaccgccaccgaaatcgccggactgttccatacgaccgtcccggcagtgaacgctgccatcaaagcagtccgcaagtcggacgtgcttaacgactacgagttgtgtcgctacatgcagcttgaaaacgggctgtacgcggacgtgtacgcgcttgaaatcatcatcccggtcgctttccggctgaacacctacaacacccacctgttccgcacatggctggtgggaaaggcactctcaaaagataaccggcaggcatacgtgatgttcattcagaacggaaaggtcgggtactgttaaaaacagattccccataagacaagtaaacgggcagcaccacaaaaggtgtcgcccgtttactttttcatgcaaccgcctcactccagcggcttgcggtagttcgcttccagcacctcgcgcagccccgtttccgggtaaagcaccttccctcccaaaaggataaaaggcaacacgcggttgttgcggtattcctgcaaggtgcgtcggctcacacggagcagttccgccacctcgccgtccgtcaggtaacgctccccgtccagcggaggacggtaactttccagaaatgcggacagccatttagagcctttgcgcatatcctgcatcacagaggctatcggctcgtcttccatcgtaaaaacatcgttggtctcgttcatcataacttcggattcagtgggtgaataaatcaaatcatctgccatgcggatagagcgtgccgacaagcggtatcagccgcttcacctcctccggcttgtaatagaacctgcggtttatctgcgagtagccgataagccgcctgtcgcgcagcgtctgcaacgtgcgcgggcttattctcaactgcccgcagacctcctcgcccgtgagccatctttccatgcgccccgtgtcgcttttgcgcctcagggcggcgaccttctccgagagtgcgccgaatgccgccaccatcatctcgaaagtctttttctcgatagatactatttccatattcatgcaattaccggtttgcccgcaaaggtaacgatgcagcccttaacacgtaccgttttccgctgaaaggctgcctgttgcgccgtttgaccgggttatggagccatcttccgtaaaaatcttacgtgagtcacgtagtgagttgttaaagccccttttgtttattgccgaattttgccgcagaaacaaaaagaaaggactgaatatgaaagtgataacgatggaaagttccgtcttccggtcattgacggaacagatagcggagattgcggcacacgtccgtgccgcctccggcgacaagaaagcggcatcgtccgacaggttgctcaccacacgcgaggcggcgcagctgcttaacgtgagtacccgcaccctccagcgtatgcgcagcgagcaacgcatcgtctatgtcgtgcttcgcggtaaatgccgctaccggcagtctgaaatcgaccgcctgcttgatgagtgtaccgtcaacgaggacgccgcgacaccgcaggagctgaaacgcaaccacacgctacgaacgggaggcacacccaaaggaaggaggacatagctatggaactgctcacacgaaacatcttcgagggctggatgcagaagctgatggaacggctcgaccgtcaggacgaactgctgctggcaataaagacggaggaacgacagcccgccctcacggaaagcatccaccttttcgacaatcaggacctgtgcatgctgctccagataagcaagcgcacactgcaacgctaccgcagcgtcggtgcattgccctacaagacactgggcaagaaaacctattacagcgaggaggatgtgctgacattcctttccaaccatatcaaggacttcaaaaaagaagatatagccttctacaaggctcgtatccataatttctttcataaataacccattaaaacatttttagatggcaaagaaaaaagacgaaaaggacgtgctggtagtccgtgacgagaagacgggcgagattagcgtggtagccgggctgaacgcagacggtacacctaaacgcacccccgcgaaagcggagaacgcgcagagtttcctgcaattcgaccgacatggcgacgtgctggacaacttcttcaagaacttcttccggcagtgcaaggaacccagccgcttcggtttctaccgcatcgcggcggaccaagtggattccatgctgggcgtgatgaaagacctgctccagcatccgtaccagaacaaacaaatcctcgcaccgcacaaaatcgacaccttcccctatcaacagcaggtgatggaagagcaagctgcgcaacagacagagaaacaagaacctcaaaaacaggagaacatggaacaacagaaagaacagcaacaggacaattccgaacagacgcagggcaaacggggctaccggcccatcgacgagagtaaaatcaactggcaggaactggaggacagatggggcgtgaagcgtgacgaccttgaaaagtccggtgaccttacgaagatgctccactacggcaagtccgacttggtgaaggtcaaaccgaccttcggcggcgaatcgttcgagctggacgcccgcctctccttcaagaaggacggcgaggggaatgtcagcctcgtgccgcacttcatccgcaaggagcagaagttagatgagtacaaggaacacaaattctccgacaatgaccggaagaacctccgcgaaacgggcaacctcggcagggtcgtggacattgtggacagggaaacgggcgaaatcatcccctcctacatcagcatcgaccgcaagacgaatgaaatcacggacattccggcgagcaaggtgcgcatcccggagcgcatcggcaagacggaaatcaccgcgcaggaacgggacatgctccgcgccggactgcccgtgcgcgacaagctcatcgagcgcaacgatggcaggaagttcgtcaccaccctgcaagtgaacgtggagcagcgcggcgtggagttcgtgccgggaaccggcaagtcaccccgtaccgcacagacgcaggaaaccaaaggcgacacctcgaaaaatcaggcgcaaggcggggaaaatgccgaccagaccaagaaggagcaacgccgcaacacgtggacgaacgaggacggcagcatccgccccatcagcaaatggagcggcgtgaacttcaccgaacagcagaaagccgactatgtggcgggcaaggccgtgaagctggagaacgtgaccgacaagcagggcttccatgccacgatgtatatcaagttcaacccggagaagggacgcccataccgctacgacacgaaccccgatgtcgggcagcaggtcgccccgtccaacgagagccgcacgcaggtggcggtgaacaacgagggcaagaccaacgaggcgacaaagaacctgaaagagcctttgcagaaaggtcagacagccccgaagaccgcccgccagcaacagcagcaggacaaaccgaagaaaacgggcaagggcatgaaaatgtaatcccgtgtccgccactgaatccaaaataaaatccaaagtatcaacaacaaaagcaagaaaacatgaagacaatcattgcagaaaagccctccgtggcacgtgaaatcgcccgcatcgtgggcgcgacaaaaagagaggaaggatatttcgaaggaggcggctatgccgtgacatgggcattcggacacctcgtccagcttgccatgcctgacggctacggcgtgcgcggattcgtccgtgacaacctcccgattatccccgacaccttcacgctcgtcccccgtcaggtcaggacagagaagggctacaagcccgacagcggcgtggtgtcgcagataaaagtcatcaaaagactgttcgatgcaagcgaacaaatcatcgtggcgaccgatgccggacgcgagggtgaacttatcttccgctacctctaccactacacgggcagtaccactcctttcgtgcgcctgtggataagctcgctcaccgacaaggctatccgcgagggattgcgcaacctcgaagacggcggcaagtatgacaacctatacctcgccgccaaagcgcgaagcgaatccgactggctcgtgggcatcaacggcacgcaggcactctccatcgccgccggacacggcacgtattccgtcggacgggtgcagacacccacgctggcgatggtgtgtgaacgctactgggagaaccgccgtttcacgcccgaagccttctggcagctccatatcgcaacggacggttgcgacggcaaggtcgtgaaattctcatcctctgaaaaatggaagtcgaaagaaccggcaacggagctatataataaggtaaaggcgacaggcttcgcaacggtaacgaaagccgagcgcaaggagaaaacggaggataccccgttgctgtacgacctgaccacgctccagaaagaagccaacgccaagcacggcttcacggcggaacagacgcttgaaatcgcgcagaagctctacgagaagaagttgataacctatccgagaacgggaagccgctacatccccgaagacgtgttcgctgaaatccccaagctgctcgcctttatcggcacgcagcccgaatggaaagacaaggtgcgggcaaaagccatcccgacacgccgcagcgtggatgacggcaaggtaacagaccaccatgccctgctcgtcacgggagagaaaccgctcttcctctccaaagaggacagcaccatttatcagatgattgccggacgcatgatagaggcattctccgaaaaatgcgtcaaggacgtgactgctgtcatggcggaatgtgccggagtggagtttaccgtgaaaggcagcgtcatcaggcaagccggatggcgtgccgtctatggcgaggaaaacaaggatgaaaccactatccccggctggcaggaaggcgacacgctgacactgaaagcctcttccatcacagaagggaagaccaagcccaagccgctacataccgaagccaccctgctgtccgcaatggaaacggcgggcaaggaaatcgaggatgacgcactgcggcaggcgatgaaggactgcggcatcggtactcccgccacacgcgcctccatcatcgaaacgctcttcaagcgcggttacatggaacgctgcaagaaatcgcttgtccccactgaaaaggggcttgcactcaattccgtggtgaagacgatgcgcatcgccgatgtcgccatgacaggcgaatgggagaaggaacttgcacgcatcgagcgtggggagctgtccgccgataccttccgcaaaaagatagaggcgtacacgcgggagattacctccgaactgctctcatgcgacaaactcttcggcagccgcgattccggttgcgcgtgtcccaagtgcggcacgggcaggatgcggttctacggcaaggtggtacgctgcgacaacacggagtgcgggcttctcgtgttccggctgaaagcgggacgcaccctgtccgacgatgaaataaaagacctgctcactgacgggcacaccaagctgctcaaaggcttcaagagcaagcagggcaagaacttcgatgccatagtcgcctttgacggggattataacacgacgttcgtgttcccggaaaagaaatgcaagtcttcctatccgaaaaaaaggaaataatcactaacttttgataagttaggctgcatctcaacaatagaaacaaacaagtttttttcgtattgtcttcgatttgcactaactttgccacttgttcagagtaatgaattgttcttcaataccggattacactcatactttggatttagtggtggcactcggagggataccgagtgcctttttcttccttttttcaaccgattatcccgttaaatatcaatccactaaactccaaagtaatgaacaacaagaagaaaaacgagggtcaggccgacttttcctattacggtctgtacctgctggactatctccgcacgaacaagtttgaacaggctgatgacactgctttcatacgggaacgcgccgaccgtgccgccgaaacgtatgaaaaggctcggctcgaaggctatcccgccgacggtgcgcaggaactggctatggacacgctgctgcgcgggctgcgttattcccgttacgacatcctccgcgaagtcgtggagaacgagttttccgatgaagtgccggaagagaagcgtgaagcctttatccataaactcctgccgcttgtcggcaacgtgttctccgtctatgacctctcggacgacaacttcgccctgtcttccgattacgacctgctctacacggagctgacgggggcaaccgtcctttacttagacgaatatggcgtttaaccgcaaacagaaactgcgggacaacatcgaggcgatacggacggcattcatccttgacagggaacagagaacggcgacaaccgaagagcgtgccatactccaaaggtactgcggtttcggcggtctgaaatgtatcctcaaccctgcgaaggaactgacggatgccgtccggtgggcgaaatccgacctcgaactgttcgccccgacggtggagctgcacaggcttatccgtgagaacagcaatgacgaaacggagtacaagcggtttgtggattcgctgaaagcgtccgtgctgaccgctttctacacccccaaagagataaccgacacccttgcggacgtgctggcggattacagcgtccgtcccacccgtatgctcgaaccgtcggcaggtgtcggcgtgttcgtggattccgtgctacggcacagccccggtgcggacgtgatggctttcgagaaggatctgctcacgggtacaatcctgcggcatctctatcccgacaagaaaacgcgcacctgcggttttgagaaaatcgaaagaccgttcaacaattatttcgacttggcgatgtccaacattccgttcggtgacattgccgtgttcgacgcggaatttgaaaagagtgggtccttcggcagacgatcggcacagaaagccatccacaactatttctttctcaaaggactggatgccgtgcgtaacggcggtatcgtggcgttcatcacctcgcaaggggtattgaacagcagcaagacctccgtgcgtaacgagctgttcagtcaggctaatctggtatctgcgatacgcctgcccaacaacctgttcacggacaacgcggggacagaagtgggcagtgacctgattgtcctgcaaaagaacctcagcaagaaggaaatgtcgcaggacgagcggctgatgaccgtgatacagacggacacgaaaaccgacctgaccgacaacgcctatttcatccaccacccggaacgcatcgtgcatacgacggcgaaacttgacacagacccctacgggaaacccgctatggtctatctgcacgagggcaagaccgcaggcatagccggggacttgcgccgtatgcttgacgaggatttccattacaggctcgccatgcgcctgtattcgggaacaatccggcaggcgggaacggaagagagggttgccgtacaaaaggaaatggagcgtcctgccataaaattggaaacggtacctccggcacaagcggtggaaactccgacggagaaaccgcaatccgcagaggaaaagccggagatagaacctcgtccgaaatattccgccggagtgcagctcacgttgctcgacctctggggcatgacggaagaggtcagccagcctaaaaccgccaaaaagaaaaaaacggcgaaaaaggaaagcccggcaaggcgcgttacgcccaagtcgcaggtgcagaccacacagaatgttacggctgtgccgacggcttccacccctaagaatgttacggaaaacaaagaggcgaaagcggacagtgccgccaagcctgccgacccggacgacatctatgcaaagctggactgggaaaccaatcctcccatcaacggcttctacgagatgatgatgggactcacgccggagcgcaggaaggaacttcgggagctggcaaggcagcataatgagaaacaggaaaacagaacggttgcgacggtcacgccggaagtaccacgtgaacacccccggcaggagaaaacacagccggaggttgccgccacacctgccgctaccgctgctccaccggaagcggtggcgacttccctttttcccgacatcgaaccggaaaagccgaaggaggaagtcgtggaccttacgccgcgtgcctaccaccgcacgccggagatgcacctgcgcgaagggtcgttagtgacagattggggacgtcataacatcggctatctgaaggacatcacaccatacggggctacattccagccgctcgacctgaaaggctaccagaaggagaaggcgttacagtatgttttactccgtgacgcctacgagcggctgtaccgctatgaatcgaacctgcacgaagcaaatgtccagtggcgtgagcatctgaacacctgttacgatgagttcgtcatgcgttacggcaacctcaacgccaagcagaacgtgaagctggtgatgatggacgcgggcgggcgtgacatcctttcgctggaacgggtgaagaacggaaagtttgtcaaggcggacatcttcgagcgtcccgtttccttcgcggtggagagccatgccaacgtaggctctcctgaagaagcactgtccgcgtcgctcaacaagttcggcacggtcgatctcgactatatgcgggagataaccgacagcacggcggaggagttgctcacagccctgcaaggacgtatctattacaatccgctcgtgaccggttacgagatcaaagaccgtttcatagccggaaacgtgatagagaaggcggaacgcatagaggcttggattggtgacaatcccgaaaatgagcgtatgcctgaagtgaaacaggcgttggaagccttgaaagacgccgaaccgccgcgcatcgccttcgaagaccttgatttcaacttcggggaacgatggattccgacgggtgtctatgccgcctacatgagccgtctgttcgacacggaggtgaaaatcgcctactccgcaagcatggacgagttttcggtggcgtgcagccacaagaacttcaagatatgggacgagttctgcgtgaagggctattaccgcagttatgacggtatgcacctcctgaaacatgccctgcacaacacctgccccgacatgatgaagtccatcggcaaggacgagcatggcaacgacatcaaggtgcgcgacagcgagggaatacaactcgccaacgccaagattgacgagatacgaaacggtttctccgaatggctcgaagagcagtcgccgcagttcaaggaacggctgacgacgatgtataaccgcaagttcaactgtttcgtacgcccgaagtatgacggctcgcaccagactttccccgacctcaatctgaaagggctggcaagccggggcatcaggagcgtctatccctcgcagatggattgcgtctggatgctcaagcagaacggcggcggaatttgcgaccacgaggttggaaccggcaagacgctgataatgtgtattgcagcgcatgaaatgaaacgtctgaacctggcgcacaagccgatgattatcgggttgaaagccaatgtcgcggagattgctgccacctatcaggcggcatatcccaatgcgcgtattctgtacgcttcggaaaaggacttttcgaccgccaaccgcgtgcgtttcttcaacaacatcaagaacaacgactacgattgtgtcatcatgtcgcacgaccagttcggcaaaataccgcagtcgccggagttgcagcaacgcatcctgcaagcggaacttgacacggtggaggaaaacctcgaagtgctgcgccagcagggaaagaacgtgtcgcgggcgatgctgaaaggtctggagaagcgcaagcacaaccttgaagcgaagctggagaaggtggaacacgccataaagtcacgcacggacgacgtggtggatttcaaacagatgggcatcgaccacatcttcattgatgaatcgcaccagttcaaaaacttgacgttcaacacgcgccatgaccgtgtggcggggctgggaaacagcgagggaagccagaaggcacttaacatgctctttgccatacgcaccatacaggagcgcacaggaaaagacttgggtgcgaccttcctctccggcacgactatcagcaactcactgactgaattgtacctgctgttcaagtacctgcgcccgaaggagctggaacggcaggacataaggtgttttgacgcttgggcggcgatatttgccaagaagacgacggattttgaatttaacgtgacgaacaatgtggtccagaaggagcgtttccgctacttcatcaaagtgccggagcttgccgccttctataatgaaatcacggactaccgcacggcggaggatgtgggcgttgaccgccctgccaagaacgagatactgcaccacataccgccaacgccggaacaggaggacttcatacagaaactgatgcagttcgcaaagactggcgatgccaccctgttgggcagactgccgctttcggaaacggaggaaaaggcgaagatgcttatcgccacggactatgcccgcaagatggcactcgacatgcgtatgatagacccgaattatgaagaccaccccgacaacaaggcgagtcactgtgccaagatgattgcggagtattaccaaaaatacgacgcgcagaagggaacgcagttcgtattctctgatttggggacataccagccgggagacgggtggaacgtctattcggaaatcaagcgcaagttgacggaggactacggcataccgccaagcgaggtgcgcttcattcaggagtgcaagaccgacaaggctcggaaggcggtgatagacgccatgaatgccggaacggtgcgtgtgctgttcggctccacctccatgctcggaacgggtgtgaacgcacagaaacggtgtgtggctatccatcaccttgatacaccgtggcgaccgtccgacctgcaacagcgtgacggacgcggagttagagccggaaacgaaattgccaagcatttcgccgggaacaacgtggacgtaataatctacgcggtggagaagtcactggacagctacaagttcaacctcctgcattgcaagcagactttcatcagccagcttaaaagcggtgcgatgggtgcacgtaccatcgacgagggggctatggacgaaaaatcgggcatgaacttctcggagtacatggcgttgctatccggcaacaccgacctgctggacaaggcgaaactggaaaaacgtatcgcctcgctcgaaggggaacgcaagtctttcaacaagggcaggcgtgattcggagttcaagctggagtcaaagacagccgagttgcgtaacaacacggctgtcatagatgccatgacggaggactggaaccgcttcctttcggtggcgcagaccgacagggagggcaaccgccttaatataataaaggtggacggtgtggattccaccgatgagaaggttatcggaaagcgtttgcaggagatagcgaaaaacgccactacgggcgggctttacacacaggtcggagaactttacggttttccgataaaggtggtgagcgagaggatactcaaagagggattggagtttaccgacaaccgcttcgtggtagaggggaactacaagtacacctataacaacggacatctggcaatggctgacccgttggccgccgcccgcaatttcctcaacgctttggagcgcatcccctccatcatcgaccagtacaagactaagaatgaagtgctggaacgtgagataccgcagttgcaggagatagcgggcaaggtgtggaagaaggaggaagaactgaaacaattgaagtctgaacttgccgcacttgaccgaaaaatacaactggaacttgcgccgcccacgcccgaagtcgccgaaaaggagaacgaagggcaacaggtcaagccggaagcggaagatgtgcggaacaggcaggcgcaatattccgaaaatgcaccgccgcagatacgcaatccatcggaaagtattatccccaatcacaccataactgggcatccggggctgtatgccaaggaggaaacccggttcaaaggattgaaaatataaccttaggaattttatctgaagtattaataggggctatcccaaaaggtctaaaagtaaattttatcctctctgcaagtatctgtaggatggtaactgcattttttctttttgggcagcccttattaaaatttattcttattttaggttatatacattcatgtccatttatgtaaaaaattcctgctgaccttgtttatgtcttgtcagtcaccatttgcaaaaccatatttgaccctcaaagaggctgaatttgataagcaacttgctacatactcataaaaggagctaaatagaacacgaatgggaaatactcaaatgccaaactaaagaagatattggccaaaataaacgctataccgagagagaaacttgatttttcaacttcctaaaacggtgttgttcaaacatttctacttatttgtacttaccagttgaacctacgcttccctaataaaatgtctatggtaaaaagttaaaaaatcctcccacttttgttagatatatttttttgtgtaattttgtaatcgttatgcggcagtaataatatacatattaatacgagttagtaatcctgtagttctcacatgctacgaggaggtattaaaaggtgcgtttcgacaacgcatctaatgtagtatattattgcttaatccaaatgaatattataaatttaggaattcttgctcacattgatgcaggaaaaacttccgtaaccgagaatctgctgtttgccagtggagcaacggaaaagtgcggccgtgtggataatggtgacaccataacagactctatggatatagagaaacgtagaggaattactgtccgggcttctacgacatctattatctggaacggggtgaaatgcaatatcattgacactccgggacacatggattttattgcggaagtggagcggacattcaaaatgcttgatggagcagtcctcatcttatccgcaaaggaaggcatacaagcgcagacaaagttgctgttcaatactttacagaagctgcaaatcccgacaattatatttatcaataagattgaccgtgccggtgtgaatttggagcgtttgtatctggatataaaaacaaatctgtcgcaagatgtcctgtgtatgcaaactgttgtcgatggatcggtttatccagtttgctcccaaacatatataaaggaagaatacaaagaatttgtatgcgaccatgacgacaacatattggaacgatatttggcggatagcgaaattccaccgactgattattggaatacgataatcgctcttgtggcaaaagccaaagtctatccggtgctacatggatcagcaatgttcaatatcggcatcaatgagttgatggacgccatcacttcttttatacttcctccggcatcagtctcagacagactttcagcttatctctataagatagagcatgaccccaaaggacataaaagaagttttctaaaaataattgacggaagtctgagacttagagacgttgtaagaatcaacgattcggaaaaatccatcaagattaaaaatctgaaaactatttatcagggcagagagataaatgttgatgaagtgggtgccaatgatatcgcgattgtagaggatatggaagattttcgaatcggagattatttaggtgctgagccttgtttgattcaaggattatctcatcagcatcccgctctcaaatcctccgtccggccagacaagcccgaagagaggagcaaggttatatccgctctgaatacattgtggattgaagacccgtctttgtccttttccataaactcatatagcgatgaattggaaatctcgttatatggtttgacccaaaaggaaatcatacagacattgctggaagaacggttttccgtcaagatccattttgatgagatcaagactatctacaaagaacgacctgtaaaaaaggtcaataagattattcagatcgaagtgccacccaacccttattgggccacaatagggctgactcttgaacccttgccgttagggacagggttgcagatcgaaagtgacatctcctatggttatctgaaccattcttttcaaaatgccgtttttgaaggaatccgtatgtcttgccaatcaggattacatggatgggaagtgacagatctgaaagtgacttttactcaagccgaatattatagcccggtaagtacacctgctgatttcaggcagctgaccccttatgtcttcaggctggctttgcaacagtcaggtgtggacattctcgaaccgatgctatattttgagttgcagataccccaggaggcaagttccaaagctattacagatttgcaaaaaatgatgtctgagattgaagacatcagttgcaataatgagtggtgtcatattaaagggaaagttccattaaatacaagtaaagactatgcctcagaaataagttcatacactaagggcttaggcatttttatggttaagccatgcgggtatcaaataacaaaaggcggttattctgataatatccgcatgaacgaaaacgataaacttttattcatgtttcaaaaaacaatgtcatcaaaataatggagcggtcaggaaatttctataaggcaatacggttgggatatatacttatctccattcttatcggatgtatggcatataatagcctctatgaatggcaggagatagaagcattagaacttggcaataaaaaaatagacgagctccgaaaagaaataaacaatatcaatattcaaatgataaaattttctctattgggtgaaacgatactggaatggaacgataaagatatcgagcattaccatgcacggcgtatggcaatggacagtatgctctgccgtttcaaggtcacctatccagcagagcgcatcgatagtgtgcgcagtcttttagaggataaggaacgacagatgttccagatagtccggttaatggatgaacaacaatctattaacaagaagatagccaatcaaattccggttattgtgcagaaaagtgtgcaggaacagtccaaaaagccaaaacgaaaaggtttcttgagcatcttcggcaaaaaagagggaacgaagccaacgacaacaacgactacgctccgttcatccaatagaaacatggtcaacgaacagaaagcgcagagccgtcgattgtcagaacaagccgatagtcttgctgcccgtaatgcagaacttaacagacaactgcaaggattgatttgccaaatcgaaaagaaggtacaatctgatttacaaaatagagaaagcgagataacagccatgcgtaaaaaatcatttatgcagataggcggcttgatgggatttgttcttttgctgttggtcatttcctatatcatcatacaccgtgatgcaaagaacattaaacgatacaaacgcaagacaacggatttgatcgagcaattggaacagtccatgcaacaaaatgaggtactcataacctcccgaaagaaagcggtacatactattacccatgagttgcgtacaccactgacggcaataaccggctataccgaacttttgcggaaagaatgcaatagcggtaataatgggcaatatatccaaaatatactgcaatcctccgaccgtatgcgggatatgctcaacactttgcttgacttcttccgcctggacaacggcaaggaacagccccgtctgtcaccctgccggatttctgcaatcacgcacacacttgaaacggagttcatgcctgttgccgtgaacaaagggctgtccttgtccgtgaagactggacacgatgccattgtattgaccgacaaagagcgaataatacaaatcgggaataacctgctgtcaaacgctgtcaagttcacagaagaaggcggtgtttctttgattactgaatatgataatggagttctgacactggtcgttgaagatacaggtacaggcatgacagaagaggaacagaaacaagcgttcggtgcgtttgaacgtctatcaaatgccgccgcaaaggagggtttcgggcttgggcttgccataatgcgtaatattgtgtcgatgcttggcggaacaatccgtttggacagcaagaaagggaaaggcagtcgtttcacagttgaaatttctatgcaggaagctgaagaacagcttggatatacaagcgatacacctgtttatcataacaataaattccatgatgttgtcgctattgacaatgatgaggtattacttctgatgctgaaagagatgtattcccaagaaggaatacactgcgacacttgcaccgatgctgcggcactgatggaaatgatacgccagaaagaatacagcctgttgctgacagacttgaatatgcccggtataaacggtttcgaattgctggaactgttgcgttcgtccaacgtgggcaattcaccaacaatcccggtggttgtggcaaccgcttcgggcagttgtaacaaaggggaactattggcaaaaggctttgccggatgcctgttcaagccgttctccatatcggaactgatggaagtttccgacaaatgtgccataaaagcgacaccggacggagaacctgatttttcagccttgctgtcttacggcaatgaagccgtcatgctggataagttgatgacggaaactgaaaaagagatgcaggcggtacaggatgcggcaatagagaaagacctgcaaaagctggattctcttacacaccacctgcgcagctcgtgggaagtactacgtgccgaccaaccgctaagggaactttacggattgcttcatggcgatacactcccggatggtgaagcgttaagccgtgctgtgactgccgtgttggaaaaaggagcggaaataatccggttggcagaaaaggaaaggagaaaatacgaagatggataagacaaaaataattgtggtggaagacaacattgtgtattgcgaatatgtctgcaatatgctgtcacgggagggctaccacactatgaaggcttaccatctctcaaccgcgaagaaacatctgcaacaggcaacggataatgacatcgtggttgccgacctgcgtctgcctgacggtaacggtatagaccttttgcgctggatgcgaaaggagggaaagatgcaacccttcattatcatgaccgactatgccgaagtgcataccgcagtggaaagcatgaagctcggttcgatagactatatccccaaacagcttgtggaggataaactggtccctcttctccgttccatacagaaagaacgacaggcgggacaacgccgtatgcccgtgtttgcccgtgaaggttccgcctttcagaaaatcatgcaccgtataaggctggtagccgctaccgatatgagcgtgatgatattcggagagaacggaacaggtaaagaacatattgcccaccacctgcacgacaaaagtaaacgggcaggcaagccattcgtggcggtggactgcggttcactcactaaagagcttgcaccatcagctttcttcggacacgtcaagggcgcgttcacgggtgcggatagtaccaagaaagggtatttctatgaagcggaaggcggcacgctgtttctggacgaggtgggcaaccttgcgttagaaacccaacagatgttactccgtgccatacaagagaggcggtatcgcccgatcggtgacaaatcggacagaagtttcaatgttcgcatcatcgccgccaccaatgaggatctggaggcggcagtgagtgaaaagcgtttccggcaggatctgttttaccgtctgcatgacttcgggataaccgttccgcccttgcgtgactgtcaggaggacatcttgccgttggcggagttcttccgcgagatagccaacaaggaattggaatgcaatgtgagcggtttcagttccgaagcacgtaaagcgttgctgacacacgcatggccgggcaacgtgcgggaacttcggcaaaagataatgggagctgtattgcaagcgcaggaaggtgtggcgacgaaagaacatctggagcttgccgtaatcaaacctacctcacacgtcagtttcgccctgcgcaatgacgtggaggataaggaacggatattacgggcgttgaaacaggcaaacggcaaccggagtgtcgccgcagaactgctcggaataggcagaacaacactatacagcaaacttgaagagtatggacttaaatataaattcaagcaatcatagcccgtaattcactgaatttggctatctttgcataacatttgagaaaaacggcgattggcaggagctttttgccgccaacatataggataagaccgcaaggcgtttcaagcgaaaatctggtaaattggaactacggagacgattgcgtgatgcttatgctatgcttatgcatagcgtgcattcacgtactctccgtaaaggctttaccagagccatcgcttgaaggtagtgtgaattgcacgctactttttttacccttgcctaacgaaaggaaacgattatgggtaaagttcagattctcgccgtactgacgatggacggatgtctttcttcagagttatatgataaagcacatcaggatttgtgccttgaccgttgcggtcttgatgaaatcagggagaaagccctttaccatgtcacaccggactattccatttcaatgctgcacgaatggcggaaagacggtacaaacattcgttacctcgcggaagccacaccagacacgtcggactatatcaacggactgctgcgtatgcacgctgtggacgaaatcatactatacaccgttcctttcatcgcgggaacaggacggcattttttcaaatcggctctgccggagcaacactggacgctttcctccttgaaaagctattccaacggtgtatgtcgcattatctatatccttgataaaaaagcaagatagccaaaatgtgcggcaagcatacatttctattttcaggaatagaataaatgttctgattacaaacaatttaagtcggagataatttgtccttgtgaaaaaatattgaattttatgcctttgaaatccagcaccttgtaaaattgagtgttggatttaatattttctgccgcgctttttgccaattatatttatgtgcgcacgcagaaaacaaagtgtaattttcaaaattgacagaaccatgaattatttcttgttggcggaaaccgactttttccgcctgataaacgaagccggcgactgcaatatggaaacggcatacacggctttcgccacccaagtgatcgaactgtgcaacggcggcatggacatgaaccttaccgtcatcgcgcttgcctacatcgaaatcgagttgcagcaccatcccgtgcgtaatctgtcagaagaaaaaagagagattgccgcctacgtcagcaaggctctgtctttcgtaagaaagatgcagaaattccttgccacgccccaagtgccaccactaatatccgccaataacgcaacagaaaccaccgccagcctcctgcaatggacgggcaatgccatcgacctcgtggaacttatctacggcatcgacgagatgggctgcatcaacaacggcaacatgccgctcaaacagcttgccccgctcctttacaagatattcggggttgagtcgaaggactgctaccgtttctacaccgacatcaaacgccggaagaacgaaagccgcacctacttccttgacagaatgcaggagaaattgaacgagaggatgctgcgcgatgatgagttggatcgtatgaggagataaaaaacaaattcattagaataaatcacatcaattcaattcattattttgttatattagaaaaagatattaactttgcattgaaattgatatagtcataattcagatgaactcaatacacgatataacagactacattatcttacgagtaaaatcggaagatagatttgcgtctttaataaatttaaagttgcagaagttattgtattatgttcaagcatggtcttatggtatcaataaaaaacctatgtttgacggcgagtttgaagcatggattcatggtccggtaaatcgagaaatctacaatcgatttaattctacaaaatatctctattcagaaatcaatattgatgattgcatgaatcacaatgtgagtttatcatcagaagacgctgaatttattgactttatattggagaattatcttaaatatagcggtgctgaattagaacgattgtcccacaatgagatgccttggattgaaacacgtggagatttaaatgtaaatgagcgttgtgacaaggttattactccagaactaatgattgagtattatgggaaaaaatgggaaactattaaatcttaattcagattctcctaaatacggaaacaaatcattagttaccaaagaacaagaaaatgagttaaagagaaggaagataactttttccttctcttactttaagcagatacctaattttcagattggagagtgttctaagggatggcatattgggcttcttgaacgattaggtgctttgggtactatgacaccgcaagaagtattagaagaaaatagaggtagtattgcattaagatgtcatccaatagattggagtgctaaaaacattcctattcaacgaaaagatttagattggctaccaaaagaaatattggacaatgagacagattttccaataatgcaattttcgataacaaaaagtacggggcgtattgtaggttattttgatcgggattcttctatatttcacatagtattattagatcctgaacataatatacaaccggcaaagaaaactaattatcaaatacaaccaactacaaaagggttatctcaatatgatgatttattaaataagttggaacgaattaaaagtatcgtatcagattgttctgataaaaagtgcaaattgcattcacatattagtgttatagaagaattacatgacaatattgtttatataggacttgataatgacttctatagcacttatcaagaaatcttaaagaaaattccattgcaaaaaattttggaaaacggaatcttagtaagtatggataatgcttaagttctaaaaaaatgaagaaaggtttatggtaagcctttcttcatttttttatttacttctgctgcaacaaatgcttcaggttgtcatcgcctgcgatgcgctccagttcatcctgcacaatctgcttcacctcttccttgatgcgccggtagttcgcctgcaccgtttccttcatgtggtcgttgccgtcctcgtccgtgaaatcggtaatgacaggaattttcttgtaggcactttcctcccgtttgaccttttcggcatccaccacaatctcgcagtggaaaatcttctgctcgatgcgctcgttgaagttgtcggacacagaaccgacaaacataccctgcgtaagaccggaaatcttgctcggcgggatgagcgcgtccatctgcgtgttgatggaggtggacacgtcctgccggttgatggagatggactgccgtttctgcaacaccttaccgaaccgttccgatagtgtctttgccgtttcgcctaccacctgcccggaaaagatattgccgacagtgttcatcaccaccttcgcctccttgtccccgtagtctcgcaccaactggctgaaatcctgaaaacccagacacacggcaaccttgttgcttcgggcggtagctataagattgtccagccctttgaagtatatcgtgggcagctcgtcaatgatgaccgacgacttcagcatccccttcttgttgatgagtttcacgatgcgggagttgtacaatccgagtgccgccccgtagatgttctggcggtcgggattgttgcccacgcataggattttcggctcttcgggattgttgatgtccagcgtaaactcgctgtccgacatcacccaatagagctgcggtgaaatcatccttgaaagcggaattttcgccgacgctatctgccccatgagctgctccgcagcccctccgagccaagcgtccatgaatggtgaaaggtagttctccagctccgggtaagaggtcagtatcggaaatatatcctcgtaacggcggttcagaaactcgatggcatgaggaaaagtgcaatacttcccgttctgatagattttgagataccagataatgctggcaaacagaatgataggagactccacgaagaagtcgccctgcttttgcacccacgttttattgaggttgagcattatcgtgtaggcactctcgtaagcgtccgtaatatcctccatgaaatccgggtgaatgggattgcaacggtgtgaacggcgcgggtcgtcgaagttgattacatagaatttcggtttcaccttgtagccctccgggtggttcagcaaatggttataggcaatagtggacaagtcgctgaatttgaagtcatatacatacatcgaaaatcccttttcaatctgttgcttgataaaattgtttacaacggcgtatgacttgccgctgcccggcgtacccaacacgatggacgcacggaagggattaaccacattgatccagccgttgttccagcgtttcctgtaatagaaacgtgtcggcagattgaccgaatactcgctttcgataagcctcgtttcctgcatgaaactctcgttctcgttgttgaaaacatcctccatcaaattgtgtttcaacagacggctcatccacagacctcccatcagcaggcagacatagcccgttccaatggtaaggacatatagtcccgtcaccgcttcaagcggcagcggcaggggcagcaaccaccagttcaggaaaaacagcacgaacccgacggcaaatgctgtccagattctcccccaagtgattttctcacccttgacacctttcgtacccagacaggacagggcaagcaaaaggacggaaaacagtttcgtgtacagtatggaatggaacaaccccgccgtgcggtcgaagttcagaaggattttgtccaccacgccgatgttcacgccccacatcctgatggcttcgtagcagaaccagtacacgttcatgaccactaaaatgatactcacggcacgcagaaaatccatgattttcgccaatgccctcaaatcgtcttcttgtgacatacattgattttttaattgttgatactctgattacatacccaagcccttgcgctttttcttctttttgcgcttcattgcccggatgaaagcctcttcctcggcatcggtcgccggaccttcgggagtgagcaagcccataccgcccgacatgtcttcacggtcgtatgcggtctgcccatataccttgtccgcaacatccgccgggatggaaagcggtataggcggttgtccggcgtatggcagtgtgaagtgttcctgcaaggcattcgccgaaagttccttacccatgcgcgaaccgttcagcacgcatcccgtgcggtggtcgatgaaggtagccccatagatgcgcccttcctctgtgtagcgcagcacggtatctatgcccttctctttgagccgggaaataaacctgtccttgtcataagtgccttgcagcacggaaaggacggtgcgtttcgtcatgtctgccagtttcctgtccttgatttccgatttggaacggacaaacttcttctgcacggcttcatagcctgcggacttcccgaagagcgaggacttgaacggattgccaactttgttacccctgtcgtccgtgacggaatagaccagcccgtgatactcccgtccgcgcacgtttcccctcgcttcctccaccgtcatattatataaggaaaggagcgcacggtattcgcccatcgtctggaagcggtactgcccgttcagagccttcacggtgttgcccacctgctttttcacatcgccagccgatgcatccaccttgcgcaacgggttatccaatccctgattttttcgttctgccggatgcaatccatacttctgttccagttccctgcgaatacggtcgctgcggcggtagagaaaatcccggttgagccttttaccgttctcgtccacgttgaccgtcacgatgtgcaggtggtggcggtcgatgtcctcgtgcttgaatacaagataaggctggtttccgaaaccgagtttttccagatactcgcgggcgatattctgcaactcaatatcggtcagcacatcctccgggtgcgggttgagtgagatatgcaccaccggcttctcgaccttcatctgcggtggcaggaaggtgtggaaaccctccatcgccttgcttatgtccaccgttcccgaaccgtcattgtagatgcggttggtggtgagaagccgcccctgcgcctcgttaatcttctccccgttgtaggcaatcgcgccgtacaacgagtttcctacactgatttttgcgaccattttgcttccatttctctcgacaattccacaatctgacggctcagtttcacgagttcgacggtgtgttgctccagcttgtagagcaacgccatcgcctttttctcggaaaaatgcagcctcaattccttcacgacttggttgtaattcgtacccacggcgcggaactgcgcgtgaaaatccgacagcttggtgtagtagtccaccagcgtcttgtccaccttcagcaccttgaacggttgcccgaagaagtgcgctttgaggaaaaccgaccgtgcatagacacccgattttccgaacatggcgaggaaacggttgtgttcctcctcgttgaaacggacggtgtaccggtacaccgccggatcaagtttgggatttctccctgctttgcttttccttttctctttcatatcactttggatttagcggattgacggcataagccgccgcttctgttcacggcaccgcagttctgaaaggctttccgacttcggagggaaagcccgtcccctgcaagggcaagtgcttttccgggatgctcaaatcattttgagcggctgaaaagacatcttgctatgttcaggtgaacataaaaatccgtcaggggacggattgggaaaatacctttcaggactccggcccgcacgccatcggcgaaccctgccgtccgggtgcaaagttacgcccttaaagcggtaatggacagatgcttgacccggtcaatggctgccaaccggcgcaacatgccgccacttgctggagaagtgatacaggttcaaaaatatacttgtttatttgcagcatgattcaagaaacgaacggtttgaagatatgaggaaaggaacattcaaatacccggacaaccgcttcggcggacacttgccgaaacggatacccgaaccgtcggaaacccggttgtccgacaatccgatgacgtatggattcaatgacttcatgacgcaatgtcgtcattcatcacttgtccgccgcaccgcttcaccgcagaaccggatacgtggtgacccgcccgtgtgcctgttcacggaaacggataatgcggtaattcaatccgcatgtaaacagaaaataaaatcatcaacaattaaactgaatagaaccatgagtaaagaaatcttcgttgcattcgcaacacagaaaggtggcattggcaaatccaccgtcacggcactcgccgccagctacctccacaacgtgaagggctacaatgtcgccgtcgttgactgcgatgatccgcagcacagcatccacggtctgcgcgaacatgagacggcactcatcggcgggagcatctacttcaaggctctcgcgtgcgaccatttccgcaagataaagaagaacgcctatccggtcatcaagagcaacgcggtgaacgccctcgacgatgcggaaaggatgatcgccgccgaggtcatgaagcccgacgtggttttcttcgacatgccgggaacactccggagcaacggcgtgataaagacgctatcgcagatggactacatcttcacgccccttagtgccgatcgcttcgtcgtggagagtaccctgaaattcgtcacgatgttccgcgacaggctgatgacgaccgggcaggcgaaaacaaaggggctttatctgttctggacgatggtggacggcagggagaggaacgacctgtacggcatctacgaagaagtgatagccgaaatgggctttccggtgctttccacccgcctgcccgacagcaagaagttccgccgcgacctatcggaagagcgcaggagcgttttccgctccactatcttcccgatggacacggcactgctgaaaggaagcggcatccgtgagttttccgaagagataagcgacatcatcagaccgcagtgagcatgggcagcaggaaagtgaacacggaaggcatcgacgaggaactgctgttggcatccattgggcggcgcactcaggacgggacactgcgtccggcgcaggaagtccccgcaaccgcaccgaccgaagatgacaccgccgtaccggagccgccacccgcgcagcccgtggcacgggagagaacgcagagggaaggcggtcgccggaaaaggcaggacgaggactataacgagctgttcctgcgccgcaacgagataaagacccgccagtgcgtctatatcagccgcgacgtacacggcaaaatcctcagaatagtgaacgatatcgccggaggggaaatctccgtgggcggctatgtggataccgtgctgcgccagcatctggaacagcacaaggagagaatcaacgaactgtacaagaaacaacgtgaagatctgatttgaaaatggaaaaagaaatgacaccgaatgaaaaaagaccgcagcaggactgcggaggcatgcttgcccaagtgaaggcgagcgtggaaatactgtcgctcgtcccggtaagcggcaaatgcagcgagaaggactatgagcgtctgtttatccgcgaccccgaagtaaaggcgcgggagggcaagatggcgtatgtgcgcccggagtaccacgagcgtatcatgcgcatcacccgtgtaatcgggcatgaccggcttacgctgtccgcctacatcgaccatgtgctgacgcaccacttcaaccagtgcgaggacgccataaagagcctttacgcccggaattacaattcagtattctaattaaaaccggaagtatatgaatgaaacaatcagtatgacagacattctgctggcggtatcggtcggctgcaacctatggttcctgttcctgctcctttacgagcgcatcatggaaacgcggcttgtccgcttcttcaagggcatagccggattatggcggtcgttggacaggaatggaccaaagagcgtagcggcacatgaggaagttcccacggcaaagggggacatcatcggcaagagccgtttcaaaatggcatccacccggacaaccgctgccataccggcgcaagaagccgccacttcggaaaaaggcattgagctgtcggaggaagaggctacttttgacgacggaaacacggaaaccgcgtcccgcccggcgcaagtcccggaggaaaagctcgatgagaccttcacgagcataccgccggaggaactgggatacggggaggacgaaccggatgaagacgcttcggacacgccacgggcttcgggcagcagctttgacgagatcgacgacgcctgcaagaccgccaagaacccggatgcaacgcaggcgcaacgtgaaaaggcggccaaggtgttcaccgacatggagggcacggagttgtacgagaaaatgatggaaggctcttcggagataggcatccgcatcaaggggcttatcgagattcggctgaagaaatctgaaaaggagttcgtcgtgccggacaacatcgaggagttcgacattcgcaactatgtatgacaacaataaaagaaatgaacatgaaagaatgacatcaacccacgcggcgaggaaacgcaaggcgcatccccatccgcaacggacacgcccacgtccgtggaaacaaacgggcatccactaaaaccaaagtaaagaaacaaagtatcaaccgcccgacaaaggaccatccacccttttgacggcaaaaaacaagaacagtttatgaacaagaacatcttgaaaaacagaaaagcaatcctctccgcggcacttgtcatcgccgcaaccgcctctgctttcgcacagggaaacggcatcgcgggcatcaacgaagccacctctatggtgagttcttatttcgaccccggaactaaactgatatacgccatcggtgcggtcgtcgggcttatcgggggcgtaaaagtgtacggcaagttttcatcgggcgaccccgacaccagcaagacagccgcctcgtggttcggcgcgtgcatcttcctgattgttgccgccaccatcctgcgctcattcttcctttaataaataatgtatggctgaatacccaatcaacaagggtatcggccgtccggtagagttcaagggcttgaaggcacagtacctcttcatcttctgcggaggtctgctggctctcttcgtcctgttcgtcatcctctacatggtcggcatcgaccagtgggtatgtatcggctttggcgcggcatcgtcctccctccttgtatggcagaccttcgcgctgaacgcccggtacggcgaacacgggctgatgaaactgggagcggcacggagccatccccgatacctgatcaaccggcggcggataacccgtctgttcaaacgacaacgaaaggaagaaacgacatgaggaatacatcaaaaatgacaacactggaaaacaagttcccgcttcttgcggtggagcatggctgcatcatctcaaaggacgccgacatcacggtggctttcgaggtggagctgccggagctttacaccgtgacgggcgcggagtacgaggcgatacacggctgctggtgcaaggcgatcaaggtgctgccggactactccgtcgtccacaaacaggactggttcatcaaggaacgctacaagccggagcttcagaaggacgacatgagcttcctctcacgaagcttcgagcgtcacttcaacgagcgtccgtacctgaaacacacctgttatctttacctgaccaagacgacaaaggagcgtaaccggatgcagagcaacttcagcacgctgtgccggggacatatcatcccgaaggagctggacagggaaaccacgaccaagttcatggaagcctgcgaacagttcgagcgtatcatgaacgacagcgggcttgtcaggttgcgccgcctctccaccgacgagattgtggggacggagggtaaggcggggctggtagaacgctacttctcgctcatgccggaaggtgacatcaccttgcaggacatcgaactttcggcaagggagatgcgcatcggcgacaaccgcctgtgcctgcacaccctctccgatgcggaagacctgccgggcaaggtggcgacagatacccgttacgagaagctctccactgaccggagtgactgccgactgtcattcgcctccccggtggggcttctgctctcctgcaaccatatctacaaccagtatgtgctgatagacaacagcgaggaagccttgcagaagttcgagaagtccgcccgtaatatgcagtcactatctcgctattcaaggagcaacagcatcaaccgcgagtggatagaccagtacctgaacgaagcccattcctacggactgacctcggtacgggcacacttcaacgtcatggcgtggagcgacgatgcggaggaactgaagcatatcaggaacgacgtgggcagccagttggcaagcatggaatgcgtgccgcgccacaacaccatcgactgcccgacactctactgggcggcgatacccggcaatgcggcggacttcccggcggaagagagtttccacactttcatcgaacaggcggtgtgcctgttcacagaggaaaccaactaccgctcttcgctctcgcccttcggcatcaagatggtggacaggctcacggggaaaccgctgcacctcgacatcagcgaccttccgatgaagcggggcatcaccacgaaccgcaacaagttcgtgctgggtccttcgggcagcggcaagtcgttcttcatgaaccacttggtgcggcaatattatgagcaaggcgcgcatgtggtgctggtggacacgggaaactcctatcagggcttgtgcggcatgatccggcgcaagacagacggggcggacggcgtgtatttcacctacacggaagagaagcccatatcgttcaacccgttctacaccgatgactacatcttcgacgtagagaagaaggacagcatcaagaccctgcttcttacgctctggaaatcggaggacgacaaggtgacgaagacggagagcggcgaactgggcagtgccgtgagtgcctatattgagcgtatccaatctgaccgtagcatcgtgccgtcgttcaacaccttctacgagtatatgcgtgacgactaccgcaaggaactggctgagcgtgacatcaaggtggagaagtccgacttcaacatcgacaacatgctcaccaccatgcggcagtattaccggggcggacgctacgacttcctgctcaactccacggagaacatcgacctgctcggcaagcggttcattgtcttcgagatagattcgattaaggaaaaccgcgaactgttccccgtcgtgaccatcatcatcatggaagccttcatcaacaagatgcggcgtctgaaaggggtacggaaacaacttattgtggaagaggcttggaaggctctctcttcagcgaacatggctgaatacctgcgctatatgtacaagaccgtcagaaagtattacggcgaggcaatcgtggtgacgcaggaggtggacgacatcatttcctctcccgtggtcaaggagagcatcatcaacaactcggattgtaaaatcctgcttgaccaaaggaaatatatgaacaagttcgaccaaatacaggcgttgctcggactgacggaaaaggagaagggacagatactctccatcaacatggcgaacaatccttcacggctctacaaggaggtgtggataggcttgggtggcacacaatcggcggtctatgccaccgaggtcagtgcagaagagtatctggtgcgcccgtaaagggaatttgacgaatgtcgctttggcaagcgactgggcaagtgtttaaaatgcccattaacaaccgctaaccggaggggaaaaccccacaagggaacatagcacgttggtaaagccataagtcagccaactgtcaggctgcgaccgaatggcaagttaaaatgatagatatgaggataaagcctgcattggttgaacgatagtccgagcagtcgtatccttgggcaatgacggaagacagttgaataattcttcggaattataccgttatgttgcggtactacactgatgacacgtagcaggagtagcataaacttaccgcaaggcaactaccataagtagtaaaggacgaaagtcgtatccgacaatctatcgagccaaatagtcgtcaaatttctaaacggggattgcctaaaccggaaagccagttgtagggctatggggtctgcccctgaatatccggcatggcaacggagcttccatagtagtctgagcagggtaacgccctgtacatggcgaaggggagcagctaattaagtttaacaatttaaaggaagatgtgagagacatgagaaatccagaaaatgtgttgaacagtctgagtaaacacagcggtaacttgaactataagtttgagcggctgtatagagtgctgtttaacgaggaaatgttttatgtagcctatcagaatatttacagcaagacaggcaacatgacggcaggagccgatggtaaaaccattgacggaatgagcattgaccgagttgaacaactgattggcagtcttaaaaaagagacttatcagcctaatccgtccaaaaggacgtacatacctaagaaaaacgggaaaaaacgtccgcttggcataccctcttttgatgataagctggtacaggaagtagtcagaatgatacttgaagcaatctatgaaggtagtcttgaacatacttcacatgggtttcgtcccaaacgaagttgtcatactgctcttatagatatacaaaagacattcactgccgtgaaatggtttattgaaggcgatattaaaggattcttcgacaatatcaatcatgacgtactgattaatattcttcgggaacgtatcgccgacgagagatttttgcggcttatcagaaaattcctgaatgccggatatgtggaagactgggtatttcatagaacgtacagtggaactccgcaaggcgggattatcagcccaatactggctaacatctaccttgacaagttcgacaagtacatcaaggaatacatcaatcggttcaataaaggggtaacaagaaaaggcgacgctcgatacaagctctacgaacagcgaagataccgactggcaaagaaactaaagaatgagaaagatgtaaaggtaaggaaacagatgaccgccgaaattaagcggctacgagaagaacggaacaactatccggcacgtaatgaaatggacagcagtatcaaacggttaaaatacgtgagatacgcagatgactttctgattggaattaccggtaatcttgaagactgcaaaacagtaaaagaggatattaagaattatttgaatgaagctcttaaactggaactgtcagacgaaaagacactgataaccaatgcgcagaaaccagcgaaatttctcggatatgacgtatttatacgtaggtgtaacgatttacgtaaggataagtacggtaaaacggttcgtgcattcggacacaagcctgtattgtacctgaattttgaaacgatgcggaagaaactctttgattataaagccgcaagaatcgcggtcgtcaatggcaaagaggtttggaaatccattgtcagaacgtacatgctgaacttggatgacttggaaatagtcagtcagttcaatgccgaaatccgagggttctataattactactcaatagccaataacagctatgtcatcaattctttctatcacattatgtcatacagcatgtataaggtatttgcgaacaaatacaaatcatctgtaaagaaaatacttctgaaatataaaaagaacaaggttttccaagtggcatatgaaaatagtaagggtaagacactttaccaatcattttatcatgatggtttcaaacgcaaaaaggttgcagggaatatttactgtgacactattccacggacagtttccataacaggtggacgtaacagccttatggaaaggctgaagctccaagtctgcgaattatgcggtgctaccgataaactcgaaatgcatcacgttcgcaaacttaaagacctgaaaggtaaatccgactgggaaaagaaaatgatagctcgaagacgaaaaactttggctgtctgctcaaagtgtcatgcaaaaatagaccccgaccgaagaatcagactgaattaattagtggagagccggatacagggagacttgtaagtccggttcggaggcgagtactcggaaacctaccatagaaatatgacaaggcgctgggtgcttagcctacgcgtacaccaccgaggaaacggagaaagtggaggtttaccgtctggcggagaagttgggcggcgacatcgaagccgccatccggcaacttgccgagaagcggagaaacaaggaaacaaccaacaattaaaaatgaatttatcaacgaaaaaagaaaaatgcgtatgagtttacagaaagtgaaaatgctgcaagtcagcaagtgtctgatcggattggcggtcatgatgctgcaatcctgcgacgtggccgacaacctccgtgatatgctgtgcgggaactgggagagcgtggaggggaagcccgacgtgcttatctacaaggagggcgaagcctacaaggtgacggtgttccgccggagcggtctgcgccgcaagctgaaaccggaaacctatctcttgcaggaggagaacggcaacctgttcatgaacaccggcttccgcatcgacgtgtcctacaacgaggccacggacgtgctgaccttctcgccgggcggcgactatgtgcgggtgaaaccgcagccgggacacccgacagaagaataacaaccactaaaatccaaagtaacatgagaacaagaataacaatgattatctgcctgtgcctgcttttcgcaggcagggcaagcgcacagtgggtcgtaagcgatccgggcaatctggcgcagggtatcatcaatgcctccaaaaacatcatccatacctccaagaccgccacgaacatggtgagcaactttcaggaaacggtgaaaatctatcagcagggcaaaaagtattacgatgccctcaaatcggtgaacaatctcgtcaaggacgcccgcaaggtgcagcagaccatcctgatggtaggcgacatcaccgacatttatgtaaacagtttccaaaggatgctccgtgatggaaatttcagaccagaagagctgtcggcaatcgctttcggttacacgaaactgctggaagagagcaacgaagtgttgacggaactgaagaatgtggtgaacatcaccacgctctccatgaccgacaaggagcgcatggacgtggtggaacgctgctactccaaaatgaagcgttaccgcaaccttgtgagctattacaccaacaagaacatctccgtgagttatctgcgtgcgaagaaaaagaacgacctcgaccgcatcatggggctgtacgggaacatgaacgaaagatactggtaagcctatggagttcgataaccttcatcagattttacgctcactttatgagcagatgatgccgctatgtggggacatggcgggtgtggcgaaaggcatcgccgggctgggtgcgctgttctacgtcgcctaccgggtatggcagtcgctggcgagagccgaaccgatagacgtattcccgatgctccgcccttttgccatcggtctgtgcatcatgttcttcccgactgtggtgctgggcacgataaacagcatcctctcacccgtcgtacagggcacggcaaagatgctggaggcggaaacgctggacatgaaccgataccgggagcagaaggacaagctggaatacgaggcgatggtacgcaaccccgaaaccgcctacctcgtgtccaacgaggaatttgacaagcaactggaggaactcggctggtcgccctccgacatggtgacgatggcgggaatgtatatcgaccggggaatgtacaacatgaagaagagcatccgcgacttcttccgcgagatactggaactgctgttccaagccgccgccctcgtgatagacaccgtccgcaccttcttcctcgtggtgctggcgatactcggtccgatagccttcgccatatcggtgtgggacggtttccaaagcacgctcacgcagtggatatgccgctacatacaggtatatctgtggctgccggtgtcggacatgttcagcaccatactggcgaagatacaggtgctgatgctgcaaagcgacatcgagcggatgcagacagacccgaacttctcgctggattcgagcgacggggtgtacatcgtgttcctctgcatcggcatcatcggctacttcaccattcccaccgttgccggctggattatccaagccggaggcatgggcggttacggtcgcaacgtgaaccagatggcgggacgtgccggaggaatggcgggcagtgttgccggagctgcgacaggcaatatgatgggacgtgccggcaaattgctgaaataacaatcatgtagaatcattgaaacagaattaagaatggaatttaagtcactcagaaacatcgaatcatcgttcaggcagatacgcctgttcggtatcgtcttcctttcgctgtgcgccgtggtgacggtatggagcgtgtggagttcctaccgtttcgcggagaagcaacgggagaaaatctatgtgctggacaacggcaagagcctgatgctcgccttgtcgcaggacttgtcgcagaaccgcccggcggaggcgcgggagcatgtgcgccgcttccacgagctgttcttcacgctgtcgcccgaaaagagcgcaattgaacacaacgtgaaacgtgccttgctgctggcggacaagagcgtgtaccactattattcggacttcgccgagaaggggtactacaaccgcatcatcgccgggaacatcaaccaagtgctgaaggtggacagcgtggtgtgcgacttcaacgcctatccctaccgtgccgtgacctacgccacgcagaaaatcatccggcagagcaacgtcaccgagcgcagcctcgtgaccacctgccgcctgctgaacgcatcgcggtcggacgacaaccccaatggcttcaccatcgagggcttcaccatcattgagaacaaggatttacagacaatcaaacggtaacggattatgaaacggaaagtaaaaagtatcagaaaaacaatgtggggcgtgtactggaagctccacgacaaacggaaacagctggtggcaaggctcaaagggtatctggacggcttgccgccggaaacacgccgccgcatcgtgctggggatgctcgccgccttcacggtgcttgccctctacaccttcggcagagccatctatgacatcggcagaaacgatggctcacgcatggaaacgggacacgccggacgggtggaactgccgaccccggcggaaacagacaatcacttaacaccttatttatatggaacagacgaagaatgaaccgatgaaagagaacaaaaccgctcccgacacgggaaagccgaaaaaggagcgcgaaccgctgacagaggcgcaacggctgaaacggcagaagatgatcgtgttgcccgctatggtgctggtgttcatcggggcgatgtggctgatattcgccccgtcctccggcaaggagcaacagccgggaacggacggatacaacaccgagatgcccgacgctgacaaggcgaacaagcagattatcggcgacaaactgaaagcctacgagcatggggagatggaggagcgtctggagagccgcaaccgtgccatcgggcagctgggcgacatgttcgaccgcgagatagctggaacggaggacgggacggacttcgacctcgccaatccgggcggcaaggaggaaaaggcacagcctgccacaccgcagactatccaatcctccgctgccgcctaccgtgacctgaacgccaccctcggcaacttctacgaacagccgaagaacgacaatgccgagatggatgagctgttggagcgcatcgcctcgctggaatcggaactggaaagcgaaaaaggcaggacttcatctatggacgaacaggtggcacttatggagaagtcctatgagctggcggcaaagtacatgggcggtcagaacggaggaaagccggaacaggcggcagagccttccaccgtgcagaagggaaagaagaacacggcgacacccgtaaggcaagtgacccgccaaatcgtttcctcccttgcacagcccatgagcaacgcggagtttgtcgccaccttctcgcaggaacgcaaccgggggttcaacacggctgtcggcactacagaggtatcggaccggaacaccataccggcgtgtgtgcatggtgcgcatggtgtgatggacggacagacggtaaggttgcgcctgctggagcctatggcggtggcgggcaggattatcccacgcaatgcagtggtggtcggcacgggcaagatacagggtgagcggctcgacatcgaggtcacctcgctggaatacgatggcacgattatcccggtggagcttgcggtctatgacacggacggacagcccggtatcttcatcccaaactcgatggagatgaacgccgtcagggaggttgccgccaacatgggcggctcattggggagcagcatcaacatctccaccaatgccggggcacagctcgcctccgatttgggcaaggggctgatacaaggcacgagccagtacatcgccaagaagatgcgcaccgtcaaggtgcatctgaaagccgggtacagggtcatgctctatcaggaaaaggactgaaaacaacaatcaataaaaaccatttaccactaaaaaaccaaaagtaatgagaaaagtaatcatcatgtttgccctcgctatgggcatcgcaactgccaacgcgcaggagaatgtaaccgttgaacagaacaacggaagtaatgaacagccgaccttgacgaaggaggtctatccgcagaaggaggcggacggcgacctgtatcacgggctgtcgcgcaagctggccttcgaccgcatgataccgccgcacggtctggaagtgacctacgacaagaccgtccacgtcatttttccggcggaggtgcgctatgtcgatttaggctcgcccgacctgattgccgggaaagccgacggagcggagaacgtcatccgtgtgaaggctacggtacggaatttccccaacgaaacgaatatgtccgtcatcacggaagacggcagtttctacaccttcaacgtgaagtacgccgccgaaccgctgttgctcaacgtggagatgtgcgacttcatccatgacggcagcacggtgaaccgcccgaacaacgcgcaggaaatctatctgaaagagctgggcagcgaaagcccgatgctggtgcgccttatcatgaagtccatccacaagcagaacaagcgcgaggtgaagcatatcggctgcaagcgtttcggcatccaataccagttgaaaggcatctacacgcacaacggcttgctctatttccacacggagataaagaaccagagcaacgtgcctttcgatgtggactacatcacttggaaaatcgtggacaagaagatggcaaagcgtactgccgtgcaggagcagattattctgccgctccgtgcgcagaactacgccacactcgtgccgggcaaaaagagcgagcgcacagtcttcacgatggcgaagttcaccatccccgatgacaagtgcctcgtggtggaattaaacgagaagaacggcggccgtcaccagtccttcgtgattgagaacgaggatttggtacgcgcgggtaccatcaatgaacttcaagtgcgctgaccatgagaaagtacatcgcaataatcatcgcgtcgcttgccctttttacggggcaggcgcacgcccagcggtgtctgccgaagatgcagggcatcgaggtgagggcggacatggcggacggcttcaatcccggcggcaagggtggcgggtacagtttcggggcggcactctccacttacacgaaaaaggggaacaagtgggtgttcggtggcgaatacctcctgaagaacaacctctataaggacaccaagatacccgtggcgcagttcacggcggagggcggctattacttcaagatactgtcggacgcccgaaaaatcgtgttcgtctatgccggggcttcggctctcgccggatatgagtctgtgaattgggggaagaaagtgctgcatgacggctccacgctgcacgaccgggacgcctttatctacggcggtgcgctgacgctcgatgtggagtgctacgtggcagaccgtatcgccctacttgccaatctgcgtgagcgttgcctgtggggtggcgacacacggaagttccacacgcagttcggggtcggcatcaagttcatcatcaactgacacgggcatggaacggacggaaatagatgctgtcagacagatgccgcttgcggacttcctcgcacggttggggtatgagcctgtcagaagtagcggtaacgagctgtggtatatcgccccgtacaggggcgagcgcacaccctctttccgtgtgaacgtggcgaaacagctctggtacgacttcggtttgggcaagggcggcgacatcttcacgcttgccggggagtttctgcaaagcgatgacttcatgaagcaagcgaagttcatagcggaagccgccaatatgacggttgccggatgggaaaagcccgtctatctctcgaagccgaccgaatccgtttttgaggatgtggaggtcgctccgctgctccgctcactgctgacggagtatttagaggaacggggcatcccttacgccatcgcatcccgtcactgctgccgcttgaactacggtgtgcgtgggaaacggtattttgccgttggctttccgaacatggcgggtggctatgaagtcagaagccgatatttcaagggttgcatacctccgaagtctgtatcactggtaaaggcgaatgacatcccggctgacgagtacctcgtgttcgagggcttcatggactttctctccgctgtgacgcttggcgtaaccggtaacgctgactgtcttgtgctgaactctgtcgccaacgtggagaaggcgacggggatgctggagggctacgggcgcatcggctgtttcctcgaccgtgacgaagccggacggcgaacgcttgccgcactcaccaagcgatatggggagcgtgtcaccgaccgttcctccctctatgacggttgcaaggacttgaacgagtacctgcaactgacaacgaaaaaacagaaaaacaaccatctaaaaatcgaagaaaaatgaacatacagaacaacagaaacaagagaaccaacatctttaaggcagtggcgttatgcctgatagtcgctgtgtcattcacccttgtgtcgtgtgacgacgacatggacatccagcagtcctatcccttcacggtggaggtcatgcccgtgccgaataaggtaacaaaggggcagacagtggaaatccgctgtgaactgaaaaaggagggcgacttcgcgggtacgctttataccatccgctatttccagttcgagggggaaggctcgctcaaaatggataacggcatcaccttcctgcccaacgaccgctacctgctggagaacgaaaagttccgcctgtactacacggcggagggtgacgaagcgcataatttcatcgtggtggtggaggacaatttcaaaaattcatacgaattggaatttgacttcaacaaccgcaatatcaaggatgacggtcttaccgccatttccatcggtaacttcagacccttgctgaaatgatgcgtgtattcatgacaatgctctgttcacttctggcggtctgttccgtgtccgcacggatcagccgccaagagggaacggacgggcaggcggcaatctaccggctgccacttttcgagcgggcggtgcgctgcacgaagtattttgagggctggcactcggaaaagcaccacccgtatgtggggtacggacaccgcttgctgccgggcgaaaggtattcggcacgaaccatgacaaagcggcaggctgacgcactcctgcggaaagacatgcggaacttctgcgcgatgttccggcagttcggaaaagacagtcttttgcttgccacgcttgcctacaatgtcggaccataccggcttttggggagcggaaagatacccaaaagctcgctgatccgaaagctggaggcgggcgacaggaacatctaccgggagtatatcgccttctgcaactacaagggaaaacgccactccatgctgctcaaacggaggaaggcggagtttgcactgctgtatgtaccataaaaggaagtgtgcataaaaaatcatccctgctacggaaatgtggtggggatgataatttcattatgaagctgtcatatatatttccgaataactatattttctgaaatctttttgtatgacatatgtagggtctggaataagcccaactaaatttcttagtctgcttattagttgctaattttgcaatactgtaaaaattaggacgtttataactatatggcaataattaatgataaatttaagcgagcaagattggaccaaagtccatatctgtttcatttcataaatggacgtgaccattctccttgtgatacgttacaaaagattttagaggaaaaacaattgattagcgataagggatatatttgtttttcggcatctcccataacagcgattaaacgtttctttgaagtaaaaaccaaaagcaccggacaacctatgtatttaccatggggattaggattttcaagagatatattagttcgtgattttggggcaagaaatgttatttatacggatggtaatgaagatataccagaacacttaaagtggagaactgatatattaaatgtggactcttatgattttgaatatctacgagagtggagaatcaaaggaaaaacatttaatttttctaattttcctcaaggagagattattgttattgctcccgatataaactcgttaaaccatttggtcgtaaagtttgatatgaagtttacaccgtatgtaaactattatactggcgatattgaagaagattggagtgaagaatttgtaagggaatggaaaggtatctcggtagataaattaggagttgataatttattagatgattttgctgtatcaggtgctactatttcacaagaaataggtgaagatatggtgaaaaaactaatatctgaaactccttggaatttactaacaaaaaaataatattatcatagattaaaacttgtttttttgtgaatggcatcgcagattggacagaggtttctttgctactttctttgtccgccatcatgctcaccgaaagaaagtagggcggctctcgccgccgccactcaaaagcgtgtgtaaagtcccgtcaccatcgtgaacatttcttccagcatatcaaaatagatgccctcgtgtacggcaatgtccttttccttgcactcgaaagtctttttgctgaatgtcctgcggtagaaccgcatattgtagaggtctgcccccgcatcatagatgatgtcaaggcggttggcacttgtcttgttccgtgtaaggctcatccgtaagccgttgcccatgtcgatgaaatcacggctgcccgtcatggcggtaaatcttcttccgcctatctgctgtaatatcgtcttggctatcatatccgttgtttttagggttttaagtgttggcggtgcggacaccgccaactcgttcaaaattctcgcatctcggcaatgggtgtctgccgttgcagccactccatattatactcgctcgtgatgactgccgtatggctgtcggtggcggtgaaacgtgtgctttcgtaatcatctatccaccctttgagggtgtccgttccccacgcttgggcatcgtcaaagataccgtccaatgtcgtgataggttcgctgaatttgactatcagcgtttgataggtcgtgttcatcggttgccctcctttccctgctttgcgttcagccacttgttccttgcggttcggcactcgtccaatgtgggtttgacacaagcgaacagttctccgtccgtatggcggtagtcgtactgcacaagtgtccgcctgcgtctgccgatacccgattggaaacgctcatatttctccgtacctgcttccgtacaggtgcttactccgttgatggtcattcgtgttgccataatgttgctttttatatgattaaaaatgtactgacagaactctgttcttcatcaccatttcggggttgctcgtgtagcgttgatgcaggtagaaatggtgttagctacatgtgagccgaagccgtaaaggaaaaacttgtcaagttcgtgcttctcggcaaactccttcacactttttctcaatccctcctcactcgttgtgagagtgaggaggtttacaaattcaatgaacatcgtggggattgcatcatcccacacacaaatcatactttcaattcttacttccatatcaatgttgttttagggtttatgctatgccactttcatccgctcacggataaggttggcgttcttgttcacaatgtctatgatacgttcgtggtattcggtgtcttggttgtacttgccgtggcactgcaccaccttgagtgtccgcaaatccacctctacggtttcaattatctcaccgccaatccttgccgagagtatgagggtgtcggctttcttgtagtattcactgccgaacacgcagatgttctgtgccttgccctcgctgtaatactcgtctatgctttcaagcaccttgatgattatttcctcgtccgtgattaccaatccgaagaatttggatttgttggcgatgaaatcttccgcatctttttccctttgcagttgccgctgttgctcacgctcacgcctttcaatctcccagcggcggcgttgctcggctcgttccttctcgtgtatggtttcaatctttcgggttgcgttgtcgtgtgccgccatgaaatcttcggggcagatgttcttcgggttgcggaggtcttgaccgagtttgttgagcatacgcagatagtcgcaccacatggagaagttgtctatccgatacttgtgacgcttggcaatcagatatgatgtccagcattcatcggcagtacgggcattgaaaagaaagtgtttcataacctcaatctcaccgcctttcataagggtttcaattcttgggtctgaaagcaaggctttgaaaagacgcacgggggaaatgccgtggaaatcgcccttgaagccattgcgtctgagttggggtaataccctcatcttgggatatgcacagcttcttgccacaacatcatcgtataggctgttgtgcggtcttatctccatcgcgctgcacaatgcccatacatcgcagtaatagaatgtgaagccacggagcaacgccatgtctgtaaccttaccgtcgggtgaaatccaacgctgcacaacctcgtggcagtagaagtgcatcggctcgcctttcctgctctcgcatctgacctgcatcacacggattacctgatagcctttgcaggtggttatcacgctgaaatactgcgtttccttgtagatacgtttgcgtgtgtcctgcactttgagtttggcatggcattgggggcaggtgcagccttcaagggtgtcgcacagtgcgctgtcgctgtgccactcgtgaccgcagtcggagcaggtaatgttccctttcttggtgcggtagccgatatgttcaacgcagtggcggtatgcccattcaatttgtgtcgttgatatggggcggaggttggctgaaagtcttgccacctctttctgtatcttggtcttcggtttcataagcctaaatcaaataatgagggttgggggtggttttcttttctcgctgacggtctgttgcggttctgcaacttgcggagttcctcctcttggtatctgcggactgcattctgacgtgcctccgccttttcctcttctgtgagttccacaacatggttcaccaccacttggcacgccataggtttgcccacctctatctcgttttcctcatagtagtggatggcttgcccaaatatctctccgtccgtgaagccgctgcaaccgcttttctgcacatagttcagaatgtgggtcacgcactcgtctatgtttttggcagggttgcggtacttcttcgcaaagagcgtatcttcctcagcccgctgttccagatacatttgtatcgttcttttgaaatggtctgttcctttcatatcgctgtcgtttttagattgtctgtttaagtatctctctccaataggtcggctctacctcgctaagaaggaagtccatgaagtccctccgtgcgtccttgttcagttcgtggtacaatcttcggaaagtgctaaaattgccgttgatgtacgtttccaccatatacacgaagatgttgtccacctcgtaatatctgcactgctgcgctaccgtcttgctgtttctctttgccatgtcggtaagggttaaagggttaataaccaaaggatgaagccgaagtaggcaatggtggaaaggatagccacgattacacctatcgccactcggaacactccgtttacaatctctctgatgatgccccaaaggatgccgaacaccccgaaggcggtgcgcatcatcaagccgcatatcgccaacccgatgtattgcgccacttgtctgaaatttgccgttgctgtcatatcttcgctgtttttgatttttttgttttttatgcggattcaagagctgagggagttgagtttcaaactatcttatctgcctctcgtttatccgacattttttttatgcgtctttctgtcgcatcggtcgttttcgtttcgggtgcttgaaaaggtagggattagggaatacaaggttttccggtcaaaatactacccgcagggctggagatttttaccgaaaacaggaggcttgaccttgctttcccgtcctatcccggaattacctttgcgcccagaacgaaaatgactgactgatgcggctcactgaaaggcgcaaaatggaggtaaacgaaaacagaggcagattgggtagaaaaaacttcaggggaaaatccgtaaaaagaggaaaccgtctgaaaccccgtaaaagcacctcttggcataggcgcaaaaagaaagaggcacagcatcatcagtctaaacatcgtttaggcgtgaggctgtgcctttttctccggctatgcggtagtcggcacacgtttgctcaaacccgttttgggcaatggtgttccgacggacaaaaccgcttttacggaaaaatcttatgaatgaggggataaaaaaatccgggagtttatatcaaaatctcggattaaatagctacttttgcatacgaagagttctttgaaggttacgcaacgcgcagaaggataatgcagtagataactaactaaatcgtaacctattactatcaagagtaattagcctacgctcatttccaataaattacactcttttcgtaacttcgaattgcaaagttactatctccgtaagtagatgttcgggccggatatttgggattatcatttgcataaggacgtatggtaggcaggttgcggtacaatccgagaaaaggagctttaatatcatctcctggtacacctggattctttttccgttcgattcgtccactcatagtagcccctattttgaatcgatcggatacatccgcttcaatgttcatttgtacgtttgtgcggttgaagtttccataattaactacgatagattcttgcaaagtattgcttactcctaaataatagcgtattttgtccgatcctcccgaaatattagcgccgacatatgattgtgcacttgtccggaaaatataatcgtaccagtcgaaaggacgatatcctttttctgtaccttgttcccatttgtgcaggtcatccattgtatagagtggattcttatttccggtgatagcatcagactgtatgtagcttctgacatatgtggctgcgtcggccggttggggatattgcagcatggactgccatccgtatcgcgcattaatagttactgtattacggctttttagcttacctttcttagtggtaactactataactccatttgcagcttgtaaaccatagatagcagccgacgcatctttcaatacagctatagattcaatatcattgtaatctatctggttgaattgtccttcattttgctggacaccatctattacgaaaagaggagtacccatgttgcgtatattgattttggttacggcaccaggacccggagcgccatcgtcatgcctgaagtttaatccggcaattttaccagcaagtgcacctgacgtgacaggagaagatgagcggactattgctttactttgtacagtactgatagctccagttaatgtaggctttttcatgcccgaaccatatccggttactacaatttcatctattacattgttatcggaaattagacggacatctatattggaggcgtctttgattactatgtccttaggcaaaaaaccgatataagagactattaatatatcgcctttaccagcttctacattgaaactgccgtttatgtctgaaacggtaccgctatttgtgtctttaagtttaatacttgctcctaccaaaggttctccattttcatctgtaatagttcctgttattattttcctggcattgtgataattgctaggtccggattgtcgctgagaaataacagtttctttgataagagttacctggttggcaacaattttatatgtcaatcccgtatgtttcaaggtctgatttaagataatgggcaacttttgttgtttgagttgtatattaacctttttttctaacagatacttgatactgtctgaatagagaaaaacatagtcactgtgtttctctatttgatttaatacagctttgatcggtccattctttacattgacagatagtaatattgtctcattttcctgtgcatttatgctcgggatagtcagtattagaaaaagtaatatgcttatatattgcaaagcataacaattattaaatcgtaattttttatagaacttattattattcatatctttgcgtagattttaatttctcgtaatgtgaaatttaattttctcttgattgccggatgatattgcagtattatccggcatttttaattttttacaggtcatgtttcataggcagatagttttagttaatattaattttctttgaaatgaggatttcgtttcctttatgggtgtatgtaatgggaataacattggaaatattttttaatgtgatgtccagatcttcgaatagtactatttttccactgcattttagactgtatatatctttttccatcttaatatttactgcataatgccgtgataatttgttgatgatcgttgaaagtggttggctctccaaatatagtaatccgtttttccaacagatatagttgtaggcattaacttgggttttatagcaactatctttacttgtagcaaacatttcatttggttttaggcaagttgacatgtgtaatttatccgagtataccttaactttaccttgagccaatactacagaatgtgcggcttcttctttgtaagaagatacattaaatttagttcctaaaacatggacgtcaaagcgagaagtatgtacaataaacggtttgtgtttattttttgctacttccacatatgcctcaccttctatggatattttgcgtattgcagaatcaagtcgggctgaatagttgaggaccgtttctgaatttacccatatttttgttccgtcagctaaagatagaaaagatgtttttcctctggggactattaatgtatgtgcacctgctgtttgagtagattttctttcttgttttctttcattttcgatgataaaggtgccattttctttatattgtaaataagaatgtgaatctaatggcaatatttctccatcagacagaataagcatgatattgtttccttgtaaaatgctgtcgatgtttacggatgcttttatagaatggggagtcgtaggattaaatttccataagcttcctagaagaataatcatgaaacatgctgcaatagaagctgcataactccagcgtttaatggtggaacgttttgtgattttgttgttaatgttcctccatatttcttctttttctgtgtttgaataagaataagcattcagcttcgttcctttcataagagagatcgcttcatttattacttcattttgttccggatattttttgataaaagaattccagtataaatgatcttcttcatcaggaaaaagctgccatttaatgaatcgttcgtcttttaagaaatcgacaggtttgtaattttgatatggtttttgcatactttatcattaaggtatatatgataaagactgcatatatttttttttataatcatttttgagaagaaaaatctctctttttcattttattttttgtatgaacttgattttaggtcgtgtcagtttagtaaataatcactatataataatagtacgataaatagatcttccttttgccggattctttctatagctctgaaaactagattacgtgtagcttgaggagtcatatctaataaagaagctatctcatcataactcatctcctgaatgaaacgaaggtatatggcttctctttgccttccggtcagcatatcaagcaacttttctactttattgtgaatttctatttggtcttctttcacaatcatttgatcaagagtagtaactttgatagtaaagagatttttgtagatgtctatttcatcagtaataatcgtatttttacttaagtcaaaaagtctattctttaacatctgaaatagatagtattttgtgttatttacccctttcaattcatttcgcttaaaataaagcttataaaagatgtcttgaatggcatcttttataagttcacgatgaaatcctaatccaataccatatgataaaaggtcatcaatgtattgattataaatcttttctattttaaaatcaccgggcatttaagagaaaaataagaatttgtattaatctttattttgctttttgtttttatgaattctcattagcccgcagaccgaaaacttttcctgtcatctgatctacaggtactttccatactttgacattccgtacggcaggatcggaatagctgaactgatctttcgtgtaatggcgcatgataatgtccagtgcacggcgcttttcctccatatcttctatgaattctacttttccacggcacattgcactctccgagcgcatactgtagctgcaagctacctgcttatgctgatagacaagtttgtgtccgaggctgaacgtgatacacacgttgttattatgttgcagcatttctatttttcccccttcgggaccggaatggaggtaaagagtatcgttttcataaccgaagttcataggaactacatatggattgccttccaggtccgttatgcctacaaagcaggcatcggcttgaagaataatggattcgattcgttgcttgtcttcgataacgattgttttcattctaatgtcagtttttacaggtttgtgccaagcctctggcacagttgtgccatcgcattggcactactatgcccagcctttggcacaagcgtgccaatagggtggcacagaagagtatactattaattcgtttttacagtacttgtttctatttctcaatcagcgcaaagtctaattgcttcttctccagattggcacgtgccacacggatagtgatggcatctcccagactatatatcttgttcttacggcgtccccggaggcaataattcttttcgtcgaattcataatagtcatcatccaggtcacggatcggaaccataccttcgcatttgttctcgttgagttcaacgtaaagcccccattccgttacaccggagatcacaccgtcataaatctgtccgagacgttcgctcatgaattctacctgtttgtatttgatagaagcacgttcggcattggctgcaatctgttccatgttcgaactatggtcgcagaggtcctcgtacttgctttcggatacgctacggccgccatccatatacttcgtaaccaagcggtgcaccatcatatccgggaatcggcggatgggtgaagtgaagtgggtgtaatagtcgaatgccagtccgtagtgaccaatattgtgcgtagaataacgcgctttctgcatggcgcggatggatacggtttcaatcaggttttcctccttcttgccatgaatatcgtccagcaaatggttgatagactttgatatatctgttttcgttccgcttgtacgcaccttatagccgaagcgggcgatgaactgtgacaggttttccaacttttccggatcgggcagatcgtggatacgataaggaagtactttaggtttcttgtttttaggcactcgtcccactttctctgcaactgtcctgttagcaagcagcatgaattcttctaccagcttgttggcatccttggactctttgaagtatacgctgataggttttcccttttcgtcgatttcaaacttcacctcgtagcggtcgaagttgatggctcctgctgcgaaacgtttctcacgaagtgctttggcgatggtgtccagcatgagaacttcttctttaaaatcgcctgttttcgtttcgatgatctgctgcgcctcttcgtaagtgaagcgacggtcggagttgatgacggtatgtacgatgcgggagtctcttacttctcctttctcggtgatgtcgaagatgacggagaatgcgagtttctcttcattcggacgcaaggaacagatgaagttacacaagcgttcgggaagcatcgggatggtacggtccaccagataaacggaagtcgcccgcttctctgcttctttgtcgatgatgccgccttcttttacatagtgagtcacatcggcgatatgtacgcctacttcccacaatccgtctttgatggggcggatcgaaagtgcgtcgtcgaagtccttggcgtctttcgggtcgatggtgaaagtcgttaccttacggaagtcttcgcgtctggctatctcttccggagtaatttctgcgggaatcttatcggctgctgtttctaccgctttcggatatacgtagggcaggccgaactcagcgaggatggcgtgcatttctgttgtattgtctcctgctacaccgaggatgtcgatcacttgtccgataggattctttgctttgtcgggccattcggttactttcacgattgccttgtcaccggtttttcctcctttcagcttctctttcgggatgaagatgtcgttggcaagcgtacggttttccgtaactaagaatgcatacgacttggctacttccagtgtacctacaaaggtgtcattggcacgttccagaatctcgatgacttctccttccgcgtctttattcttccgcttggcgtagaaagtgatctttactttgtcattgttcatggcatgtgccgaattgcgttcggcaacaaagatcggatcacctccaccttcggggataaaggagttctttccgttgctcttgcgttggaaggtaccgatcatctccgttccgtgattgttgaggcggaactttcctttttcaatttcggaaatataatcgtcatctgaaaggtcgtgtaacaggtcagcgcatagcattttctgcggatgggtagtgagatgcaactccgagaaaatatatttcatactaagcgtttcgctgggtttggcatggaaaaagtctatcaataacgctgccagctctttcttactcattcttttgccggcctttttctctttcttttctttctttttcgccataatgtatagaattgatttatttgaaaattctttgatgggagtacaaagtaaacaaatatttgaatttgatagttatgaattggataaaactttcgctgacttcgataatttcgtccttattaaaataaaaagtattccttctaaggtgatttaggaggaatgcttataagagagaataattgagaaatgcaaaatggcttttattttatatttattgtatctttgtagcatcattcttttcttatacattgaggttataattaatggagagcatcttaataacaggagcaagcggatttataggaagttttattgtcgaagaggcattaaaacgaaagtttggtgtgtgggcggggattcgtcccaccagcagcaaaaagtacttgaagaaccggaagatccactttctggaactggactttgcccatcccaatgaattgcgtgcccaactctccggacataaaggaacctataataagtttgattatatcatccattgtgcgggagtcacgaaatgtccggataagaatacttttgattatgtgaattatctccagaccaaatactttattgataccctgaaagcgttgaatatggttccgaagcaattcatctatatcagtacgctgagtgtattcggacctgtacgtgaaaaagattattcgccgatagaagccggtgatgtcccgatgccaaatactgcttatggtcttagcaagcttaaggctgaactttatattcaaagtattcccggtttcccttatgttatttatcgccctacaggagtttacggtcctcgtgaactggattatttcctgatggcgaagtccatccggcagcatgttgacttctctgtcggcttccggcggcaggacctgacttttgtttatgtaaaagacattgtgcaggccatcttccttggaatagaaaaaaaagtgactagaagagcttattttctgactgacgggaaggtgtataatagtcgtgttttttcggacttaatacaaaaagaactgggtaatccgtttgttattcatgtgaaatgtccattaattgtgctaaaagttatatctttgctcgctgaattcattgcaacacgttccggcaagagcagtacgctgaattctgataaatataaaataatgaaacaacgtaactggcaatgtgatataacccctgccattaatgagttagggtatgctcccgaatatgacttggagaagggagtccgtgaaaccattgactggtataaaaacgaaggatggctttagacttatttaagcgagtggaaacccggaaggggttgtttgctgtggagaagataacattgatttataatctgttgacctccattttgattctgttcctgtttcagcgaatggatcatccatggcacatgttgctggatagggcgatgatcgctgcaatgacttttctgctgatgtatctttatcggctggctccttgcaagttttcggcgtttgtacgtgttgctattcagatgagcctgctttcctactggtatccggatacgtttgagtttaaccggttctttccgaatctcgaccatgtgtttgctataaccgagcagtttatcttcaatgggcaacctgctatctggttctgtcatacattcccgcatcttttggtcagtgaagcattcaatatgggatatttcttttattatccgatgatgctcattgtgacggtgttttattttatctataagtttgaatggtttgagaagatgtcgtttgtactggtaacttctttctttatctattatctgatttatatctttgttccggtagcagggccgcagttctacttcccggctataggttttgataatgtatctaaaggaattttcccggctatcggcgattatttcaataacaatcaggagttacttcccggtccgggctatcaacatggcttcttttacagtttggtagaaggttcgcagcaagtgggagagcgtcctacggcagctttccccagttcgcatgtcggtatttctaccattcttatgattatggcatggcgtggaagtaagaagttgtttgcctgtctgatccctttctatatgctgctttgcggggctaccgtgtatattcaggcacactacgttatcgatgcgatcgtaggtttcttctctgcattcttgttgtatgttgtggcgacgtggatgttcaagaagtggtttgcgcagccgatgtttaagtaaaactaatctaaaagagaatttactttttcaggaattgtttcgaatatccggaacaattcttctttcgtttctgcccgcaacatggcaatacgagtctctttaaaattaggaatccctttgaacaacggactggcagccaagtggcggcgcacgtgcaagatgcccctgcgttcatcaagcagattcacactgtcaatcacttcctggcgaagtacctccatacaccattcaaagctgagtggcggcaattcctcccccgtttccagataatgctttacttccttgaatatccagggacgtccgaagctggcacgaccgatcatgacggcatctactccgtagcggtcaaaacactccttgcagcgttggggcgttgtcacatctccgttgccaatgataggaatgtgcatcctttgattgttctttacttctccgatcagtgtccagtctgcttctccggtgtacatctgcgcacgggttctaccgtgaatggtcagtgcggcaatgccgcaatcctgtagttgttctgccagatctacaatgattttattgttggcgtcccatcccaaacgggtttttactgtgacaggtattttgactgcgtccactacggcacgggtaatttccagcatcttcggaatattttgcagcattcctgctcctgctccttttcctgctactctcttcacggggcagccgaagtttatgtcgagaatatcgggctgcgcctgctctacgatcttcgcagcttcgaccatcgtttccgtatctttaccataaatctgaatagctacagggcgttcttcatcactgatactcagcttctgtgcagtcttgctgacagagcgtatcagtgcatcgctcgatacaaattcagtatataccatgtcagctccgaactttttgcacatcaggcggaaagctggatctgttacgtcttccattggggcgagaaggatgggatgttctcccaggtctatatggcttattttcataatcgatacttctttttgcggtgcaaaggtacggataaaaactgaaagaactatttgttgaggtaagtttcacggatacggattaattcgtacctttgcattctcctatcacatttaaatgattatcagatagtaaaatgaatataaaagattttgaaataatggcgcctgtcggttcgcgtgaatcccttgcggcagccattcaggctggagccgattctatctattttggtatagaaaaccttaacatgcgtgcccgttctgccaatacgtttaccgttgatgacttgcgtgagatagctcagacgtgtgatgaacatggaatgaaaagctatctgaccgttaataccattatctatgataaggatattcctttgatgcgtaccattgtggacgcggctaaagcggcaggaatatcagcggtgatcgctgccgatgtagcggtaatgaactatgcccgtcagatcggtcaggaagtacacctgtctactcaattgaatatatcgaatgcggaagccttgaagttctacgcccagtttgccgatgtcgtagtgctggcccgtgagttgaatctggaacaggtggccgggatttatcgtcagattcgggaagagaatatctgcggtccgagcggagagcagattcgtattgaaatgttctgtcacggtgccttgtgcatggcagtctccggtaagtgctatttgtctctgcacgaaatgaatcactcggccaatcggggtgcctgtatgcaggtatgccgccgttcttatacggttcgcgataaggagacggatgtggaactggatatcgacaatgaatatatcatgtcaccgaaagacttgaagaccattcattttatgaataagatgatggatgcgggtgtgcgtgtattcaagattgagggacgtgcccgcggtcctgagtatgtgcgtacggtggtggaatgttataaagaagcgataaaggcctatctggatgatacgtttacagacgaaaagattgccgcttgggatgaacgtttgaaagctgtatttaaccgtggcttttgggatggctactatctgggacaacgcttgggcgaatggacgcggaattatggttcggccgctactgaacgtaaaatctatgtgggcaaaggtatcaaatacttctccaatatcggtgtctctgagttcttggtagaagctgccgaagtcagtgtaggtgacaagctgctgataacgggacctaccaccggcgcagtctttatgacactggacgaagcgcgtgtcgatctgaagccggtagagacggtaaagaaaggtcagcgtttctcaatgaaatcagagaagatacgtcccagcgacaaattatataaattggtatctaccgaagaattgaagaaattcaagggacttgatgtagaacagaaaagaggataaacgatgagccagtatatctacgaattggagatgaaggtgcgtgattacgaatgtgaccttcaggggattgtcaacaatgccaattatcagcattatctggagcatacccgccacgagtttctgacctcggtaggtgttagctttgcggcgttgcatgaacagggagtcgatccggtagtggcacgtatcaatatggctttcaagactccgttgaagagtggggatgagtttgtctccaaactgtatatgaagaaagaaggcatcaaatacgtattctatcaggatatcttccgcaaaagcgatcagaaagtagtagtgaaatccactgttgagacggtatgtgtggtaaacggacgtttaagtaacagcgaattgttcgacaatgtctttgctccatacctgaaatgaccgataacgaacaagaacaaatatatagcatcgctctgacaatggtgcccggtatcgggcacattggagcgaaacgtctggtagagggcatgaagagtgccaccgatgtgttccgcttccggaaagaactggcgcagcgattatccggagtacatgaacgggtgtcgggtgcactggactgtccgtcaattattgcccgtgccgaacaggaacttgtattcctgcaaaagaatcatatccagtgcctgacttttcatgatgaggcgtatccttcccgcttgcgggagtgtgaagacgctcctgttgtactgttctataagggaaatgccgatttgaacgctctccatatcattaatatggtgggcacccgccacgctactgattacggtacgcaactctgtactactttcctccgtgacttaaaaactttgtgtcctgatgtattagttgtcagcggccttgcttacggcattgatatcaatgcccaccggagtgcattggacaatgacttgcctacggtcggcgtgttagctcacggactggaccgtatttacccttctcttcatcgtaagacagccgttgaaatgcttgataaaggcggattgctgacagagtttcctgtcggtacaacaccggataaacacaattttatcagtcgcaaccgtattgtggccggtatgtgtgatgctacgattgtggtagaatcggctgccaaaggtggctctctgatcacagccgagcttgcggaaagctatcaccgcgactgtttcgccttccctggtcgtgtgaccgacgaatattcaaaaggatgtaaccaactgatccgtgacagtaaagcatcccttctgttgtctgccgaagacttggtggaggcgatgggatggacgttggattcacatccggcaaaggtagagaatgtacagcgcagcctgtttctggaactgacagaagaggagcaaaaggtagtccatacgttggaaaaacaaggaaacttacagattaataccttagtggtagagacagatattcccgtacataaaatgagtgcaattctctttgaactggaaatgaagggagccgtacgggtattggcaggaggagtttatcaattattataaatctaatgaccaacctaaaacaatttgaaatgaaacgacatttttgggcattcatggcaatagtatgcctgttaaccgtccagaacacacaaggacaacaaatggttcttgcacagaaaaaatgcagttttagagtgtgaaaagtatgtttattgttacttcattctgttttttctcctatcttagtggcataataaaaaacaaacaactatgaatcaaacacgttgtatcgtaattttgtctattcttgctctttttgtagcaagcgtatctgttgccggaaatatctctctaccggatgcttctcaaaaggtttttgaaggaaaaccatgtataaactctccccgggcgattggcaattatcctgccagtcctttcctcttttatattcctactaccggtcagcggccgatggaatggagtgcggagaaacttccgaaaggattgaaactggattcgaaaacagggattatcacaggatcagtagcttctaaaggtgaatatactgtcactcttaaagctaagaacgcattggggaccagcatggaaaagctcgtgatccgcattggtgatgacctgttgctgactcctcccatgggttggaacagttggaatactttcgggcgacatctcaccgaagagttggttttgcaaactgcggatgcgctggtagccaacggaatgcgggatttaggctattcctatattaacatcgacgacttctggcagttgcccgaacggggagctgacggacatttgcagattaataaagataagttcccgcgtggaataaagtatgtggcagattatctgcacgagcgcggtttcaaactcggaatttattcggatgcagccgataagacttgtggcggtgtatgcggcagttacggctacgaagaagtggatgcgaaagatttcgcttcgtggggtgtcgatttgttgaagtatgattattgcaatgctcctgtcgaccgggtggaggctatggagcgctatgcaaagatgggaaaggcgttgcgtgctacgggacgttccatcgtgttctccatttgtgagtggggacagcgcgaaccttggaaatgggcaaaacaggtaggcggacatttgtggcgcgtttcgggagatataggcgatgtctggaaccgggaagctaacaagttgggcgggcttcgtggtatcctgaatattcttgaaatcaatgctcctttgagtgaatatggcggtccttccggctggaatgatccggatatgctggtagttggtatcggtggtaagagtatgagtatcggatatgaatcggaaggttgcacccacgaacagtataagtctcattttgcattatggtgtatgatggcttctccattactttgcggaaatgacgtgcgaagtatgaatgacagtacattgcaggttctgttggatagggacctgattgctatcaaccaggatgtgttgggcaagcaggcggagcgcagcatccgtgcagatcattatgatatttgggtaaagccgttggctgacggtcgcaaagcggtagcttgttttaaccgggcggatactccacgtactatagaattaaattcaaaaacggtggaagacctgtctttggagcaggtgtatagtcttgacagccgttctatggaaaatgctgcgaataacataatggtggacttggcgccttaccaatgcaaggtttatatctgtggaaagccgaaaaaatagtcaatgacagtactggaatgacagtaataaatctctgaggtaaaataaagaaaggttggggcataaaaaaaggagcaacgccttgctccaacctttgttaaccttaaatctaatactatgaaaaaaatcacatgacaaatgtaagtcttcttgctattccttccaaataatattcttgtatttgcgtctcttttgatttctttcacggattttcactgttatcgcacacaatgggtctgaattgaggaatctcagcctttttattaactaacaagtttgttactaacaaagttgttagtaacaaacttgttagtcattgacgatgcaatccttgcttatgtgccagtactccagttctttaatttgttattaacgctcgaaggtcttgaggacttgacaaaggcttttttatgttgtatatttatagtcgtaataacaacaataaaattcaaatcaaaacttagaaacgaatgagaggaatcttatcttttgctgcactggctgcgatgtacttccccggatgtacaacgagtaaaaatgcggtgcattgtctcagccgatggattaaaggttgtaacccgttggtcaaagaacttataccgacaggttacttgccgtacaatcaccggtttttgacatcaaaacagtataagatcataacaaaacatctaggagatccttatgaggattagggcataagtagcccggcaatgagcaaaaggctgcaaacttttacggagtttgcagccttttttgttgcataaattcaagaaaaagagatttgaaaggcgtatcggcgtttttaataaacttgggaaccgtttctaataaacgatgaaagaatttattagaaactcaaatacggttttagtatacagtgtctatgtttttcattgtgggtaaatcgggagaaggcagtatcgtattcattggattagtatattggtaaatttgcatgactatttttacctttctctcatagaccgttttgtatgacaaagtatcatgttgctttttcgttggttatactataatgcagctaatttgtacgtaattctatttgagcaaacagaataattcgtttatttgcatatgataaataccgaaatgagtattattgctctattatatatatgtatattcggttttctaaaattataaagctatgagaaagcacacttttctatttattatctttttgtatgttggcatctgcatacaggttaaggcaacagatcaaagaggagaatatctcgtcataggtaaagatacattggaaatgtttacttgaccattgggagatagtgagactctgagtaagcaggtaaagaattgtatttcgaagcgctccttctctactgattgcgggcgggggtatgtcggtatatggagactggaaaccgacagactctattgggagaaacagcaatgaacgcactttcgaaaaaaaatattcatctgtatagtcgattgaaaataagcgaattactttaggatatttactgctttaaagccattgaaaggagacacaagggggactaaaggggagtggacggtttgcgtcctgttatatctttgcagagtcattcagacgaaacggaatggcaaacagataacctttatttttttaaccatttaacctttaacaattatggctttagagtatgtagtaacaaaaagagtgttcggttttgacaaggacaaaaacgaaaagtatgtagcaaagtcggttcgttccggcagagtaagtttttccaagatgtgcggcaaggtgagccgtctttgcggagttcatcgcaaagttgtggatctggtcgtcagcggtttggtcgatatgatggcggaggacattgacgacggaaagagcgttcagatgggtgagttcggcatctttagccctactattcgcgctaagagtgcggatgacgagaaggaagtatcgtctaagtcaatcgtccaaagaaagatcctcttctatcctggaaaaatattcaagaccacgttggatgatatgagtataactcgtcgtgcggaattggatacggactatacggacggaagtagtaacaatggcagcggtagcgtaaaacctaatcccggtggagacggaggaaagggtgatgaagaagcgccggacccgactgtataagtcttctgtactttccttttaggtagcagacagcgtgggaaaggcttattgaaaagttgcaaatgcacagatgatcggttatactcgattttctgtgcattttttctttatataataccttggtgtatctattgtttcctccttatctgcttctaaacttgcaaattcgttccaatcgtttcacagaaccttccatgtcctgttttttgttctgctagtatgatttagtttatattataacttctatatttgttcacagaaacgaacaattatgaaacacggaatctatacatgcgttattctcatggcatttcttgctttatcagaaagtgtgtatgcagtggttccggttttcacgattgcgagtgacactatcaggcgggtggtgatatatttcgatcaggaagaaacagatgttgattcctgttataaaactaataatcaagaagttaatgttttagattctttgcttgaggaaagaataaattcaagatatatcactgcgctcaatgtggtcacttttgtatcgcctgacggagattcggtttacaatgccgcattatctgtccgaagaaacaattcgatgagagagttcttaaggcaacgttatccgtatgttgatgtcgaaaagattaaacttacttctgaaggagaagactggtctgaacttcgtaagttggtggcgtcggattcagacttgccggaccgggaagaagtcttgatgttgatagattatcatcgggataacatcgtgaagcgaaaagaactgttgcagaagttgaatcagggaatggcttaccgatatattgtccgcaacgtgttacctaagttgagacgcgctgagattacggttgtccgggaagttccggaaatggaaaagaatacttttgaaccggtatcttctgtctccggattgtttgtttcaaagcaggaagaggcgcttccgagcgatcaacctgataagccggagggagaaagtaaagagagtatggcttatgaggtggtagtgtcggaggcagaagggccggttgaaagtaaaacggtgcttgcagtgaagaataatctgttgtacgatttggcgttggcgccgaatctggaagtagagattccggtaggcaaaaggtggtctttaaatgctgaatacaaatgtccgtggtggctgaacagtaaacatgatttctgttatcagcttctttcgggaggagtggaaggacgttgctggttgggcaatcgtcagaagcgcaaccggttgacaggacattttgttgggctttatgctgaaggtggaatttacgatttccagtggaagggagacggttatcggggcgattattacggagctgcgggagtgacctacgggtatgcgcggcaactggctcgccatctgtcgctcgaatttagcttcggcatcgggtatctgacaacagaatataagaaatatactccttacgagggggatatcgtgtggacaactagtggacgttataactttataggtcctaccaaggcgaaagtctctctggtatggctgataaaaagagggagataaggacgttatgcaagatacaagatacatacttcttgtgcttctgtcctcgctgctgatgctgaccggatgtagccgtcgcgaactattggatgattatcccgtaagcggggtagatataaagttagattggaacggtgttaccgataagttgccggaaggggttcgggtgattttttatccgaagagtgcggaaggcagaaagattgatacatacctttcagtaagaggtggaaaagtaaaggtgccgccggggcgttactcggtagtggcttacaactacgacactgaaacggtacagatcagaggagaggaagcctatgagacgattgaagcatttacaggctattgcaatggtctgggaatagcgggaacggaaaaaatggtatggggacctgatcccttatacgtagtgcagatcgatgatttacatatagcgaacagtgaagaagagcttctactggattggaaaccgaaattagtggtaaagacctattctttcaagatcaaggtggaagggctggaatatgtttcttcaatcgttggcagtgtggaaggtatggcgggttgttactgtttgggcagatgttgcgggaaaatgaacgatgctcctatctactttgaagcgcaaggacgttcgggcgaagtaacgggtagttttacagcttttgggttaccggaaggggcgatgagtcgggcaggtcttgctataaagtttacgctggcatttattaaagtagataaaaccgtgcagaaggcggagattgatataacggaggtgattgctgattttgagagtggtgaaggcggagaaggagatgttgatgaaccgcctacggagatagagttgccacttgatgatcagattgaggttgaaaggccagagaatccgcctagcggtgatggtggcggtattggtggtgatgtagatggttggggcgatgaagatgaagtgatacttcctgttgagtaaggttaaacataaacgaaatataacaatattaacgattaaaaaaacaattatgaaaaaagtattattggctattgcagcagttgcaacaattacaagctgctcacagagtgaagattttgagaatccgggacgagaagcggaaattagttttaatagtgtgataaataagtctactagagctgcgattattgaaaatgataagtttgaatcatttactgtctctggttatagaactaccgatgcaatgacgagtgggacgcaacttactggaggctttatggatgatgtcgcagtaagtaaagccgaaggaggatggagccaagtgggcacattttattggccagctactgcttatgtaagcttctttgcaacctctccaaaacaaactttagatataacgaaagcaggtttccctaaatttaattacactgttggtgaaactactacacaagtcgatttgttagcagccaatttaataaatcagcagaaatcagataataaggtaactttaggtttccgtcatttattgactcaagtgaatttttcaataaaaggtgaaaaagattttaaatatgtaattagtaaactagaagtatcaggagttagtactagtgcaacttattcttttgatggtaatacgagtactgttggtgcttgggagaactggggaacagctgatggagcatatacctatgatataacagaagatcctaaagaaataactgttacagatattgcttctgttactaatttagacgtagctgagacttctttgtttatgcttgttcctcaaacattgacggaatcggctaaagtttctattacatattatgctattccaaaggataaaacagattctcttgataaaacttttgaaggaacaaaaacagtcgaattaggtatatcaacaaaatgggaagcaaacaaaaaggttcgttatactttagtgttatctagtgatgctaagtctatagaaataggtgaacctactgttacagcttgggatactcttgaggttaatggtggagaagtgattcctgtggcatcggtaactcctcctgttgagtaatattgtattttttataattctgagctgtataaatcatttagatttatacagctcagaatttatatagctatatgtaaacgcaacgtcttttcacttttttccttcttttctattgccatctaaaagatttcatatatttttgttgcaaacaggaacaaatcaaacgccaacacaaatatatgtcatcaatctgtcagggtacttgggattgtcagaactgtccgaaagccgtagacaatgctattattcacattactcatacaagggggtaccatcaaccagcccggaagtgtgaagataatttcatcctttttttgataaaaggagagcttttggttaatagccaggagtatgcaggtacgatgttgaaagcaggtgaatttattcttcaggccattggttcaaaatacgagatgcttgcgatgaccgagtgcgaatgtatctattatcgttttattcagccggaactattctgtgacttccgtttcaatcatatcatgaaggatgtaccttctccgcttatctattctcctttaaagataattcctgaattgaaatactttttggatggttccaaatcctatttgagtgaaagtaaagtctgccgggatctgctgtctttaaagcgcaaagaactggcgtttgtgctaagctactattattcggattatgacttggctagtttggtgcatccactctcgaaatacaccaccacttttgaatacttcatccttcagaactataagaaagtaaaaacggtagaagaactggctcaactgggaggttataccgtcagcaccttgcggcgtatcttcaataatgtattccacgaaccggtatacgaatggatgcaggcgcgacgtaaggaaggtattttggatgacttgaataactctgagtacagtatctccgaaatatgctataaatacggttttgagtctctgcctcacttctccaatttctgtaagaagttctttggagcttctccacgtatgcttagaacaagcaagaagaacgtctgataatttttcagagagaaagtcaaaaactatttttttctttgtgggtgtagtacatttgttgtatattgctagctgtttcctttaaaaccagtctaatacatctttattataaagtcagatcacttcaaataaagccatgataaggtggatacggaaattaaattttttatttcaacgaattaaaatcaggtttcaaagcagaatagtaacatgatagattatgctgaatgaaagataataggatatttttctaatactcttttgtgtaatcagaagagagtctgagtttgaaatctattatggcacgtacaataggatataaatcataaatactatgtaatgagaacaaaacgagcttttaaggaattttgtgtattgggtggtttggcatcttccgtttgcggggtggctcaggagcgcccgaatattattgttttccttgtagatgacatgggacttatggatacgtcggttccttttatcgcagatgagagtggtcagccggtgcgtcatccgctgaatgactggtatcataccccgaatatggagagactggctaaacagggtatttgtttctctactttttacgcacagagcgtgagttccccttccagagcttccatcatgaccggacagaatgcgaccaggcatggagtcactaactggattaatgctgagagcaacaaccggaatcctttcggaccgccccaatggaactggaaaggtctcagaaaagatatgcctaccatgccgagagtcctgcaacaagccggatataaaaccattcatgtaggaaaggcacatttcggctgtatgggaagcgaaggagagaatccgctgaatatcggctttgatgtaaatatcgcaggttccggcattggacatcccggcagctattatggcgaatggggatacgggcatatcaagggacagaagattagagcagttcctgacctggagaaatatcacggtacagataccttcctgagtgaagcgctgactatagaagcgaatcgggagatcaccaaagccgtagaagaaaaacgacctttctatctgaatatggcccattacgcagttcattcacctttccaggcagacaaacgtttcttgtcacgctacaccgacccggataagaacgagcaggcaagagcttttgctacattgatagaaggcatggataaatcattaggcgacatcatggaccaactcgaaaagctgggaattgccgaaaatacgctgattctctttttaggagataacggtggtgatgctccattgggagatgaacgtggctatggttcttccgctccgctgagaggtaaaaaggggacggagtttgaaggtggtatgcgtgttcctttcatcgcagcttgggcaaagcctgagaagaagagcaaagtacagaagaacttgcctattgaagtaggaagtatgcagacacagttgggcacaatcatggatatctatccgactgttctgtctgtggcaggatgcgaagttccccaaaactacgtgatagacggattcgatctgaaaaagcaactgagcggtaaggtggacaagaagcgtcccgagtctttcctgatgcacttccctcacgcacaccgcggcagctacttcaccacctatcgcatgggcgactggaaactgatttattattatcttcccgagactccgaaacaacccaaagccttgctttacaatctgaaagacgatccggaagaaaggaatgagctgtctgccgcacatccggatcaatgcagagagatgattcgggaaatgtccgcccggctagaaaaggaaggagctctttatccggtggataaacaaggaaatgagttgaagccttttgtttacttttaaataggtgctactatttcaactgtctgttttgccaaagcatatctattaggcaaaacagacagaattatatatcatttgtcagatacaattgctatgaccggattggcatcctcatccaattggctcatccaatggggaatattctcatttttattgtcagattgtttttgagaagcatcaggaatactggcagcttccagaataaatccatattctcctttataactgcacaatgccgacaggtcaactttcagttcctgctctgaagtgagatcgtcaacaatgaattgctggcactttgcaaacttagtttgctgtgtttctttattatacaaaccattatagacttgtttgttttttacgtattgaaaaaatacagaatgtgtgttttccaatacataagctacgtagatactttgcggattactataccataaaggattggcggatgaatgatctgtatctgtatgaaaaaccatatatggatatagtttcctgtttttaattgtgtatatcgtgtctgtgaaggtttctctgaaacgtacttcattctcggacgaccataggctgggattatagagaggcagcagtaattctccttgctccttatctttgataatcattacccctcttcttcccagatttccaaagaaacctgctcctctttttatgatagaaaggctggatatattatccggagaagggatagagggcgattttaataaattgggaattgaatccagcttttctccaaaggagttgaggaaaagcaaagagttgctggattccaatcctatactactattacaatgggcaataatggtagagtcggaaaacgcgaaaaagtcgggtgcggcaggtatatgtggaatttgaattttcccggtcatttctcctttctgattatattttagcaactggtccggtgcgcgaaagaagtaaaaaagacctgcatcatctatccagtaatttgtcgagctatatccacttggatcatcaccgatatggcctatactgcatatatacttcccggtctgtttgtggaataagaaacattggtctttagtagcaatcacaatcttgtcttccagcagcgctatatggggattgtttcctatcaggcatacttcgttggtttccaaaggtacataacgtacagtatttccgaagtcagataactttaggctttgggaatcagttgcatccgtaagatttacaaataatgtatccctggcattctcctgatttgtgatgcatgaggttagtaagactactatccatatcagcaataatttattcatcgtatttaatttatttgattgtctggccttatgtcacaaagaaaagaataaaaaacggataatgaacaagctatctataaataattggtcagtaaaaagaaatcccccgccagctaacgccgacgggggatttatgctattaatcaaatcaagctcacgcttagtctttcagtttagcgatgatgaagtcgcggttcaggcgggcgatgttgctgatagagatgttcttcggacattcagcctcgcaagcgcgggtgttggtacagttaccgaatccgagttcgtccatcttggacaacatagctttcgcacggcgtagagcttccggtttaccttgcggaagcaagttcaactggctgacctttgccgaaacgaacaacatggcagaaccattcttacaagcagctacacaagcaccgcaaccgatacaagaagcggcatccatagcttcgtcagcgatgggcttcgggatcaggatagcgttggcatcctgcggagcacctgtacgaacgcttacgtaaccaccggcctgcatgatcttgtcataagcagtacggtctaccatcaagtccttgatgacagggaaaccggccgaacgccaaggctcaacagtgatggtgtcaccatcgttgaaacgacgcatgtaaatctggcaagtagtagcacctgttgcaggaccgtgcggatgtccgttgatgtaaagagaacacataccgcagataccttcgcggcagtcgtggtcgaatacaaccggttcttttctttcgctgatcagctgttcgttcagaatatccagcatttcgaggaaggaagtatcaccggggatatctttcatttggtaggtttcaaaagcgcctttagccttcgggcctgcttgacgccataccttcagtgtaaatgatatatttttatccattttcgtctaattcttttaaatgtttaacttcaccgattagctcttgtagttacgggtctgaaccttgatagcttcgtataccagcggttctttgatcaatacaggagccttttcatcgtcaccctgatattcccagcaagctacgtagaagaagttttcgtcatcacgttttgcttctccttcttcagtctggtattcttcacggaagtgaccaccacaactttcgttacggttcaatgcgtcgtaagcaacgagctcgcccatagtgatgaagtcatacagacggatagccttgtcgagctcaacgttcataccttccttagaaccggggataaacagattggtttcgaattccttgcggactgctttcagttcggcgatacctttcttcaggccttctgccgtacgtcccatacctacgtattcccacatgatgtgacccagtttcttgtggatagaatcaactgattctttaccctggatgctcatgaacttgtcgatcttagcctgaactgccttttctgcttcggcaaattccggaaggtcggtagagaaacgaggaacagtaatctgatctgccagatagttctggatagtgtaaggcaatacgaagtaaccgtcggccagaccttgcatcaatgcggaagcaccgaggcggtttgcaccgtggtcggagaagttacattcaccgatagcgaacagacccttgatggtagtctgcagttcgtagtctacccagataccacccattgtgtagtggatagccggataaatcatcatcggattataatatttcacaccactgatttcttttgccagttcgcccggattaacgtcagtgatttcttcatacatgtcgaagaggttaccataacgctgaagcactacatcgatgcccaggcggttgatagcttcagagaaatcgaggaatacggccagacctgtgttgttcacaccgaaacctgcgtcgcaacgttctttagctgcacggctggcaacgtcacgcggaaccaggttaccgaatgccggataacggcgttccaggtagtagtcgcggtcttcttcaggaatatcgcttcccttgatttcgcctttctgcaatttgatagcgtcttctttcttcttcggaacccagatacgaccgtcgttacgcagagattcggacatcagagtcagtttggactgcttgtcaccgtgtaccgggatacaagtcgggtgaatctgaacgtatgcggggttagcgaatacagcacccttgcggtagcaagagatagcagctgtacagttacaacccatagcgttggtagacaggaagtaagcgttaccgtaaccaccggtagcgattactacggcgtgagcagcgaaacgttccagttcgccggtgattaagttcttggcaatgataccgcgagcacgtccgtcgatgattacaacgtcctgcatttcataacgggtgaacaacttcaccgtacctacgtttacctgacggcttagtgcggagtaagcacccagcaacagctgctgaccggtctggcctttagcgtagaacgtacgtgatacctgtgcaccaccgaaagaacggttgtccagtgtaccgccgtattcgcgtgcaaaaggaacaccctgggctacgcattggtcgatgatagcgttggatacttcggccagacggtaaacgttggcttcacgtgcacgatagtcaccaccttttactgtatcgtaaaacagacggtaaacggagtcaccatcattctgataattctttgcagcattgataccaccctgtgcagcgatagagtgtgcacggcgcggagagtcctgaatacagaagttgaatactctgaaacccatttcaccgagggatgcagcagcagaagcacctgccagacccgtacccacaacgatgatatccaaacggcgtttattagcggggttcaccaatttctggtgagctttatagttggtccatttctcagccaccgggccttctggaatttttgaatctatcttgatcataatattatttacaatttaatcatttacaatttactatttagcaagcaccgccacaaaggagtgatttcacgaagaataccactactacgagtgcgaaaccgagtactacaatcgtagaatagatgttagaaatacatttccaacgattgatccataccttgttgttccatcccagtgattgcatggagctccagaaaccgtgagtcaggtggaaccacagagcaaacagccaaatgaggtagagcactacataaaccggacaagagaatgtctgctggatgtgatatgcaccgtttgccgcataagccagcgtcagtgtatcagcgtgcatgtccaggttgtgcatcagttccggcaactgcatttttgcccagaagttgaagaggtgcaaaccgaggcctacgataacgataatgcctaacaccaacatgttttgagaagcccactctacagttttcggtttgtcgactactgcatagcgttcgctaccgcgcgctgtgcgattctgcattgtcagccagaacgcgtagatgatgtgaataatgaaaagagcagccagtgctgcggtagctaccagcgcataccagtttgctcccaaaaactcacaaatcatgttgtaaccatcagccgagatgattgcaactaagttcatcgccatgtgaaatgttagaaacaggacaagggcgataccggtaacgctcatcaccactttccttcctacagatgaattacttaaccacataaatgattgaatttaaattatttaattgttagaactaaaatttcgacgttttacacctcttacagactgcaaaaataggggaaatagattgattgaccaaagaattaaagaaataattccttaatcggtgatctttccgattttttcgccattggccgctttcttgcgcaaggcgcgcggggtgtctccgaaggagtctttgcagaagtgtgcaaggtgggacagcgagtcgaaaccataccggttgcaaatctctgtaatccgcatattagagtgctgtaggtcttcgaggatgccttcccgttttttctccagcatccattcgtagacgggcacgccgtataagtttcggaagagacggcggaaggtggtggtgttatagcctcccagatgtgcgaattcttcgacgttcttcgctttgctgtaattctgcatgacaaagtattggaaactttccgtataggtgctgatcgggtagaagaaagccctcaactggggcaggggatagtaattggtgatcatatacaccatctcctgacatttcaggtcgatatatttgccgcaggcgggtgtcgattcgtcaaggtatgcggctacgtcgttgatgagatagaacaggcgcgggttcatcaccattggggtgtaggtcagcgggccttctgcctggtcgatgatttcacggtagcggttttcgcatagcaacggcagttcgttgaaccagaaaaggatgtatgatacgtccgtcagtgccagtatctcgtattttgagccgatggcttgcaggataaactgtttctcgtgtagtgtcgttccgggatgttcgtcactgttgatcagcaattcgccctcgatcataaagagcatgcagttttgcgtgcacttatccttcggaatatgctgccctctgagcagatttctgtgaataagagtactttccatcgctttggggcatcctgagcaatctgtatgttgagcacaaagtgagtcttttgacatgggttttatccgtgaatcgttgtctacagggacaaagatagtcgttttttgtgaaaataaaattctttcttccattatgttttagcagaaacggggatatgattgtctttattggttttgtttgcacaactttgaagtttcacggactcctgaatggcgttctttaatacattaatacatttttatctgccatctgcagcattttcttcatccctttacatgatatattcagaacaagtagtttcatcattagttccacctgttgaaaccaagtgtttcaaggcatgaaacaaactgtttcaagtaatgaaacttcttggaacaactgtcgatttcgttcatatgacagctcgattcaactcacttgaccgcataagttgctctgattgacctgtccgttcgaaaggtattatttcatttttcagtcaataatggatgacttctcagctgttaatacctgatttctcaattattaatagctgacatgacaatcgttaatagctgacgcgtcagatgttaatacccagtaaatcaaagtataatgtaggataaacgacctatatgccgtggtggcagagtgagagcaaacccttgctctcactctgccaccatacttgctgtaatgcttgaaatgccgatgaataaagggatacacgcgaataatgagagcgttagggcaaaactgctatctttttcacttgtagcagctgcctaagttcaagttataaatgcgacagttcagtttccgtaccagtcacttacttattatagtatttttcaagcagttcctgcatttccggatatttctcgtccgtatctccggtttctttgcgaagtctcaataagtctttcttcatctgtttgatgacaggtgcatatttcggatcgttgtatgcattatgattctcgtgcggatcattctgtaagtcatagaagtcccatgacggagtaaagtcaaagttctccgtatcagtcatgtctagatttcgggcataatagaagatcagcttgtaacggtctgaccggatggcgaagtgcgcgggacgaatagcatgattggtccagtagcgatagtagatttcttttcgccagtcggtcggcgtgttgccttccaggttgctgacgaagctgtctccttgcacattctccatctttactccggcaaattctgccagcgtcggtgcgaaatcgacattcagtatcagatcgtccagacgttttcctgcgggtaccttcttcggataacggataacgaaaggcatacgagccgattcttcataaaacatccgtttgtcgaagaagccgtgttcgcctaggaaatagccttggtcggagacgtagatgacgatggtattgtcggcgatattcatttcgtccagagcgtttaggagtttgccgatgttgtcgtcgacggtagcgccgcaacggaggtagtcacggataaacttttggtaggaagcacgtctggcggccgtccgttgcatcccttcggtgctgaacggcagtccggggtagcgacaccaccacttgtcggggtcctgtgatgcgatgcgccagcggcgttccagctcttccagtgtctgtcctttgaaagaacggccgttggtttccggtccccagtccagcaggttttcgggttcggggaaggtgacgccgtcgtagagatgctccatgcgtatcgggtagtcgtagggttcgtgcgttgctttgaaatggcagcacatcaggaagggttggttgccgtcctgctctttcatccatcggatggctttctcggtgacgaggtcggtggagaagccgagcacccgttcgccgaactggtggttgccgggccacgggtcggtgctctctatgaaagtcgggtcacggtattcgccttgatcgtagaagatggagtagtagtcgaatccttgcggttgcgactggatatgccatttgccgacgagtccggtgtggtatccgttggcttgtagcagggtggcaagggtggggatggaggtgtccagtgagtccgcaagggtgtacagtctgttccggtgactgtatagaccggtgaggatactggcacggctgggtgctgagatagagttggtgcagaaacagttgtcgagcactaccccttcttttgccagccggcggatgttggcgttgtgggcatattctgccagtactccgccatagatgccccaggcttgggaggtgtggtcgtcactcaggataaaaaggatgttggggcgttgtccggcaggttgagcgccttgcaggtgcgtcatggttccggctgccagcagaccggtaagtacgagtttattcatatacgtatagatgttgcatttcttcaaaagtcagtctaagttagacggttgctttcatgtagataaatgatcatatgaactgattttatgcctaaagatagtgattgttattcactttgtattataatccggaaaacttttgcgatttaatgtaattgattccggtaaaacacttaattccctttttaaaaggatgtttttgttttacatctctcaataagaaactttatgttgatttttggaagtattatagtgatttttgaacatttgttttctttgcctgtacctacttttgcgatcaaaacccattaattatcaattattatgctactaccaagaaaaattgtatttttccttctcttgtttgtcggattatcgttgtatgcgcaacaaaactgcttcattagttcgtatgtacggggtaatttctacaatcgcggacgtatttctgccgagagtttaagggcgagtgatgatctgatttttctgaacgtccgtcccaataaagacgggtcgctttcgtttgagaatccccgtatctttgagaatgggaaaggagtgactagttgggaggaattgataaagtctgtccgtgcggatgtgaaaggaacaaagacaaaacttcgtctgggcgctgccagtggcgagtggaaagcgatggttgcagatgaggcggcccgtgttgcatttgccaaaaacataaagaagatactggaaaagaataagctcgatggcatcgatctggattttgaatgggcggagactgaaaaagagtatgaagattacagtctggctattctgaagatgagagaggtattgggagataaatatgtgttcagcgtatccctgcatcctgtgtgttataagattagtaaagaggcgattgctgcggtcgatttcatttcttatcagtgttacggtccttcgccggttcgcttcccgatggagaaatactgttcggatatacagatggcgttggcttatggcattccaaaggaaaagctggtggcaggcgttcctttctatggcgtgacaaaagatggctcaaagaagactgaggcttacttcagttttgtgcaggacgggctgattacggggccggcacaaaacgaagtaacctataaaggagacgtgtatgtctttgacgggcaaaataatatccgtgccaagacacgttatgcgatggaccagcagctcaaaggaatgatgagctgggacttggctacggatatgccgctgaatgacagcagatcgttgtttaagacgatggtggaggagttggggaggtgaactgcttcagataatctgaaggagagacaccaaactcatccttaaaacattgacggaagtagcctgtactgttcattcctattttataggctatttccgagatattatattttccttcgaggagtaaccgttccgcattctgcatttttactttccggatgtactcgttcgtagaaagtccggtcagtgctttcattttccggtagagcgtagaaccgctcatgcacatcttgtcggacagataagtgatgtcgatcttctccgaagaaaggttgtcctcaaccaattgcgtgattttctcaatgaattcgttatccagtttgctgagcgcttcggtgattatggaacgcttttcatccaaatgagaattggggttatgactcgttccggtctgctggaattgagcaatcagtttctttctcgaatcaagcagattgttgatgcggcttcgcagcagtgaagcactgaaaggcttggtcagataagaatccgctcccacttcgtatccttcttctttatcctgcaatgaatctttggccgttaacaggatgacagggatgtggctggtacgcacatcctcttttagttgacggcatagcgtgatgccatccattaccggcatcatgatatcgcttactataatatcgggaatacggttgagagcctgctgtttcccttcctcaccgttgctgcctgtgattacttcgaaagattcggagaaagattcggcgatgtatttctgtatatcttcattgtcttctacaatcagcaggataggcttgctcgtttccggttccgtattttgagaatcttccggaacagcttctgatatcatttcctcctctgtttgcttcgtagagtctccatgcaaagcgttggggtagatattatctgttaataaactgatatagaaagtacttccttcgttctgtatgctttccacccggatttcgccttcgtgcagttctacaagatttcggactaaagccagtccgatacctgtgccggatgcctgatgcttgccgctttcctgatagtaacggtcgaaaacatgaggcaaggcttccgcagagattccgtatcccgtatcactgactttaatctccgtataagtgaccccgtttcgtgtggtgggatacaagctcaaggttatttttccctgttccgtatatttgatggcattggaaatcagattatcgaggataatggtgatgatttctttgtcaaagaacagaggcatttcttctttttctatttgaatctgaaagtcaatcgctttcttttggttgagttctttgtatttgagtccgatttcatgaatcaggggcgcaatgttgcctttacaaacacatagctttttgttctgcgtttccgttttccggaactcaagaatctgattgatcaggttgagcagccggagggcactcaggtggatgacagaaagtttctgcacctgtctggtcggcagtgacgtgtctttctgcatatcttccagcggaccgaggatcagggtcagtggtgtgcgcagctcatgagtgatgttagtatagaatcgcaagcgttcctgattcaattcttgttcttgttcgtggtttttcttttccagcgtatagaggctttcgaggtctattttcttcttataggcatggataatagtataaataatgctgatagtgatcagaatataaataagttttgcccaccatgtcagccagagaggagggttaatatgtatcctgagagatgtcgtgtcctccgaccagtcctgattgtgcaggcgggcttttaccagaaactcatacttgccgggaggaatattgcggaaggtgacgctgttttgctcgttgatcgtataccatgagttttcaagtcctttcagcatataggcatattccacttggttggccagtgaatagtcctgtacgttgaaagtaagattaaaactattttgttcatgagtcaattctatctctccttcggaaatgggaatagcggtttcgttcttctcccgacttgtgagtcgtccgggaattctcactttagtgataaccacaggaggaatctgcggactgtttatggcaatatcggggttgaagaaacacaatccgttgatagagccgaaatagatgagcccgttatgatctttggtaacgcatccgctgatgaaacttccttgtgggatgttgttggagtgatcgtaggtatagaaacattttttagaggtgatatagcaactgatgccggtattggtacttgcccagatgttgccgttcttatcttcactgatagctcttatatgtgtattgggcagtccttcttttctttgaaaaacctgatagtcaaaattgcgggccgaaggaaaacataccagcccctcaccggtggcaagccacatctgacctttgctgctccggtatatctgattaatcgtattggaacaaaaaccttcgtattggttgaacttcctgaccagttgcatatccggcgtatatatcccgactcctcctccgaaagttcctatccagaaacgtccttcactgtcttgggcaatgctgcgtacaaagttttccagcaactggctgttggaggtgtcataatgatgaatcaccttcttgctggcaaggtctacaacgaacacccctgcgtgagttcctatccatatctttttattcttgtcttcatagaagacgcgtacgtcgagaagctgattcttttccagttcgatgatctgaaacttcttcagtcttgtattgtaatagctgatgttgcccagataggtgccgaaccataggttgccttccgagtctttcagcgaacaaagcactgagttggacaggagttctctgttttctttattgtaaatggccacccgttttccgttttcgaatacgttaatacctcctccgtcagttcctatccacaattttccttgtccgtcatcgcagacgctgctaacgactttgttgctcagcgaactttcattcatttgggtgggtgaatagctccatgtatggaatgcgggaggagcattgctgataaaattgattcctcctccccaagtccctatccagatattattaaaagagtcttgaaagatataccgtgcgctggcgttggacaaactgtagttattgtccccttcgcggataaactcaaagcgtatttgttcgggcagcagaaactgattttgctgtaagtccagtatcatgattccgttcagttctgttgcaatccagagtttgttgtctttgagttgtttgatggagaagatatagcttgacaatgctccgtgaatattccccgggttgttatgaaagttggtaaatgtttctgtattggcattgaacagggctagtcctttgctggttccgatccatatatttccgttggtatctttatagatacaacgcacatcgttccccggaaggctgttcgggttttgaggatcatggacgaagtgcttcacggatttgtcattcagggagaggatgctcaacccgccttctacgtgtccgatgtatagtttgccatcctcagcctccgtggctgtccaggtctgctcagagggaagggcgggtactgtgcttttgttataatgagtgaatttcccggtagcgatgtccagatactctatacctctgtaataagtacatacccataaccctttgccggcttgtacggatgaggtaatgtgagtgacatcgttcgttatcagactttgcgggtcttccggattatattggtagacgctgaaactttgtgtctcgtaattataagcgttgagtcctgcccgctgggtggctatccagataacaggctgcacgggatcggcgtacacttcattgagttcgttgccggtaatgctttgaacagaagaagattgctcctctttatagtaggtgataaagcgggttccgtcaaacttattcagcccttcttcggtggcgaaccacagaaatccctgcttgtcctgcgtgatactcaatacataattgttggataagccttgttctattcccaatctttggatgaggtaagggtgggctgccacaaatgtggcggatagcaggaggaagaaagccgcaatgtatgttttcatcgtttcagatattatgtattccttgatattcactctcaaaagtacaaataaatcttgtatttagtatagacaaatgattcattgcatgattttctaccctttctgcatgatttttacagcgaataaaataaaacaactgtaattttgcaatcaatcaaataaccgaatctaatacttgcagaaaatggaatctgattctttacacgaacatgataaaagctggaaggcattttttattaccactctgttcatcttgtgtacagcgaacgtttatgcgcagtcatccgatacaatcttttcccgatatttccgttatgcgcagaacttcgcagatgcgtaccctcgcgagaaagtgagtcttcatttggataatgcaagttattaccttggtgatacgatttggttcaaagcgtatgtagtgacggctgaacaaaacttaccgacgacgatcagcaaacctttgtatgtagaattactggaccagttgggaaatgtcgtagagcggcaaattattcagcttacggatggggagggaacgggacaaatcattttgaacaataccttctttaccggttattatgaaatgcgtgcctatacaaagtggatgcttgcttttgataacccttcctgtttttcccgtgtattacccgtctatcggaaacggctgagcgatgaagagactcctcggagtatagctacctatcgtatggacgcttcgatgaaacagaggccgaaggataaagagaagaagtttacagtccgcttttttccggagggtggacaactggttaaaggcatatcttcgattgtagcttttgaagccaccagccgtgacaaaggagctgctgatgtagagggaacagtggttttgccgagtggtgaagaactggcgcatatccgttcattgcatgacgggatgggttactttgagtataagcccgaagaaaaggcgggtgtggcaaaaattgattatgaaggctccacttatcagtttgaccttccggaagctcttccacaaggatatgtactccgaatcgataaccggcgggaaatgttggatatcactgtagcccgcagttcacaggcaatgaaagacacactggctgtttttgtatcttctcaggggcgaccttacaaatgtatgacactggactttgaagatgaattgaactgccaattccggatttcgactaaagaactaccgcccggagtgcaacagatatctctggtcaatctgaaaggggaaacgttatgcgagcgtttttgttatgtgatgccgcgttcttccatgctccttgcctgtaaaacggatcacgccctgtatcgtccttttgagccggtgacttgccggattaaagtgagagatcatctgaatcgtccggtacaggccaatctttctgtatctatccgcaacggtgtagagtctgattttcgggaatacgatcattccatttatacggatttgttgcttgtctccgatctgaaaggctatattcatcaacccggtttttattttgagaaccagtctgccgaacgtttcaaaatgttggatgtccttctgttggtacgtggctggcggaagtatgacctttcccgactgataggtaaacgtcctttcttgcctcggtatcttccggagacctcgctgaccctgtatggacaggtcgaatcttatttcggtaaggcgttacggaatgtcggggtgagtattcttgcgcgcagggattcggtctctattgcaggtatgacaaaaacggattcattggggtattttagtgcgccggtagatggttttagcggttctatggatgctctcatacagacacggaacgagggaaagaagtggaacaagcaggcagtcgtgaagttgttccgtaattttgagccttccttacggaagcttgattattatgagctgaatccggaatggaaagaggcgggtgatttgaaacagttgttggacaccttggatattgcttataaagattctgtattcggaccggatcatcatttgctggatgaagtggtggtgaacgccaagcgtctgaacttgttattgaagcaaactgaacgctttgaaaaagagattctgggttattataatataacgcaggtggtagataaaatgcgtgataaaggagaagcggtgtacaatctgcctatgctgttgaaggaattaaatcctaatttcagattgagtgattcgctgagcctgcactataataactcaagagttttatttatagtcaacggcggggttttatcttatggtaaaacggattatgtgttggacaaagatgtggatgctattaaatctatcatgctttattatgatcaggcagggggggaatctgtttttgtgatgaacaagcagagtaatagagtgacgaaatttacagcaaataatttttggagtggtcgctggcaggatggagatttgagtgatttgtctttgcaggatgctataggtgcggattccggaccagatgcactttggggtgagaaagatagaaagactatgaagaaaggtccgttgcagaaatcgtcagtagtagtttgctccatcactacgattgatgactgggacccgaacaaaacttataaagcccggcgggggattcgtcatacctatatacaaggatataatgagcccttggaattttattcaccagcttatcctgatggcgctcctctctatacggaagattctcgccgcacactatactggaatccgaatgtgaaaacgaatgaaaagggtgaagcagtcattcgatgctataattccgataattcggcgccgttaataataaatgtagagacattgtataaaggtagtccgtcatcattgaatatctactctatagattattaaactcgatctatattattcatattcatataaagtcctgctaaagaggaagaaaggagttgtgtttcttgcagccaacgtgtgtaaatcgtttatgaatgattctctacgttttttgaatgatttttataatgtaaaatctacactcattcgtatctttgctgtagataacaacgaaataaactaatattatgaaaatgaaaactaatataatctttaaaaaactaaagtcattcgtcaatcgatgtctttttcctgattatatgtgctgttttatcttcctgcgtttataacgctgatatgccaataaagaatttttagtgaaccaataatttaatatgtaaaaagaaaaacgttatgaaaagactatttcttcccttattagggtttttgtcgttggtgctgatgtgctgtaatgacaacaaggaatcaggtacggattcctatgacccgaacaaacctgtcactattgactattttacgccggataccggtcgggtagcagagaaagtgattattataggtaataactttggaaatgacaaatctgtggtaaccgtattattcacagataatatggaaaaggagaacaaggctgccgtagtgggagtagataatactacgatttattgtatggcgccacgtcaggcagaaggtttcaataagattacggttaaggtgaatgatcagactgtggtggctgatgagacttttaaatattctgtgtctgagaatgtatctactattgccggtgattttgtacgagctgatggtgccggtaaagatggaagtctggctgaggcaacttttgggcagatgtttggtgttgcttgcattgatgagcagtcaggtattgtaggtcaggcatggaataataacagtatacgttatgtctctatagacgaagatgctgtgattactatccaaagcggtcctgtggttgggaaagtggcgatatctaatgataaaacattggcttatggtgctaccattaatggtgctaatactgtttatgtctataagaaatcgcaggcatgggttccttctcggctttgtgatatcagttcaggtaccgatgtttgggctgtggctttgaatggtgataaccaatggttgtattatgttacgagaaatggtcgtttgggacgtattgaagtcaataatccaactcataatgagattttgtttgaacataatgattttagtggcggtcctttcgcttacatcgcttatagtgcttttgaagattgtttctatgtaactactgataaaaataagattctgaaagtttgggtaaaagaagatggtacacatgcttacgagcagattaaccagaataatacaggaactacagatggttttctgactgatgaggcaaaattccagtttttgcgtggcctaacaatagatgaagatggtaatattttcgtttgtcaggagaataatcatgtgattcgtaaaatagcttatgatgagaaaatggaaaaaagatatgtaactactattttgggtacagctggtgtaaaaggtgatgacgatggttctcctgatattgctttatttgcaaatccccaagatatcagttatgacgggaatggtggattttggattgctcagcgtgaaaatccggctttaagaaagtactcagtagaataaacacattaatcaggaattaatcatgaaaaaaataataagcatcttatttatattatgcggcatcttctcttctatggcctatgcgcagggaggattgacatattccggtactgtcattggtgaagacggattggaacttataggtgtgagtgttgctgtgaaagggacatctatcggagtaatcaccgacttggacggaaagttccgtttgaataatattcctcccaaatctaccgttgtgttttcctatgtaggttttgagaataaagaagtgaaagtaaccgaatctaaagagcgtgagactattgtattgaaacaaagtatcagtagtttggatgaagtagtggtagtaggtcgtggttcacagcgtaaagtttctgttgtgggagctattacttctgttgatccggcacagttgcaggttcctgctacttccgtatccaatatgcttcaaggtcgtgtgccgggcatcattggtgtgactcgtagtggtgagccgggcaataacttctctgaattttgggtacgtggtatcagtacgtttggggcaaatgcttcggcgctgatcctgattgacggtgtagaaggtgacttgaatacactcgaccctgcagatattgaaagtttctcagttttgaaagatgcttcggcaactgccgtatatggtgtgcgtggtgccaatggcgtagtaattgtaactaccaagagaggtaaagccggtaagttaactgttaacttcaagacaaatgccacatattcctattctccccgcatgccggagtatgtagatgcagtgggctatgcaaaccttgctaatgaagcacgtgttgtcagaggtaagaatccgatttatactaattctgaaatccaactgttccgttccggacttgatccggacctttatccgaatgtaaactggagagatgtgattctgaacgattatgtgattaataaccagcatcacttaagtctttccggtggtggaacaaatgcacgctactatgtaagtatgggtatcatgaaccagggagctgttttcaaacaagataagtcagcgagcaaacataacactaatgttgattaccatcaatataatttcagagcgaatgtagacgctaatatgactaagacaactttgctctctttgaatatggaaacgattatcaccaagcgtaattctccgggatatggagataataacaatgcgttatgggcggcgcaagccaatctcccggcgaccattgtgccggtgaaatactctaatggtactcttccttcatttggtaaaaattcagatgaggtttctccctatgtacagctgaactatacaggttataagataagcgaaacacaggccactcgtatgaatgccagtctgaatcagaagttggatttcatcacaaaaggactgtctgcaagaggcgtattctcatttaactataccggctactttgaccagtatcgtaccaagactccggacttatattacgccacaggaagaaagcagaatggagcattaatctctaagcgtacatggagtgctactgatatgacttacggcgattatcgccgcattgcccgtcagtattattttgaaggaaatatcaattacgaaagaatctttggcgaagaccatcgtgtgaccggattacttaatgcctatcgtcaggaaaataaggactcttatctgaataatgaagacgatgacactacattggatgaaagaattcgttctattcctaaacgttatcaggctatttctgctcgtgctacttattcttataaggatacttatatgtttgaattcaatgtaggatataccggttccgagcaattcaagaaaggcaaccgctacgggtggttcccggcagtagctttgggatgggtgcctactcagtatgaatggacgcgtgaaaaacttccgttcctcgatttcttcaaactcagagcttctttgggtaaagtaggtaatgaccgtatcaagaaaattcgcttcccgtatctttctactgtatctaccgattatagttcagtaacgtggcctggtagcaccgttggcgagactcgtgtaggtgccaatgacttgaactgggaagagacaaccaaaatggatattggtgtggacctgaaaatgtttaatgacaaagtggaactgactgccgacatctttaaggataaaaacaaaggtatcttccagcaacgtgccaacattcctgaagaagcaggttttgtaaccaatccgtataccaacatcggtggaatggaatcatggggatttgatggaaacataacgttcaaccataatttcaccaaagattttggaatgacagttcgtggtaactggacatttgcccgcaataacgtaacctattgggagcaatcaggcgtagtatatccttaccaatcttttattgacgttccttatggtgtgcaacgcggtttgatatctttaggtttgttcaaagatcaggcagatattgaaagtagtcctgttcaaacctattcttctgatgtgcgtccgggtgacattaagtataaagatgtcaatggtgacggtgttatcaatgatgatgatattgtaccgttatcctattcgaatactccgactcttcaatatggttttgctgctgaattcagatacaaacagtttactgccagcattttctttgaaggtgtaggtaaagtacaatatttctatgggggttcaggatactatccgtttgcttgggaaacgcgaggcaatgtacttaacattgtggctgatcaaaagaaccgctggataccgagagaatattccggtgacgccagtacggaaaatccgaacgcacgttttccgcgtctgacttatggtgagaataagaacaataaccgcgcatctaccttttggttggcagatggccgctatttcagattgaaaaatatcgagttgtcttatagattcaccagcgcatggttgcgagataagattagtgtacagaatgctaccctgagctttgtaggcgaaaacctgcatgtatgggataaggtgaaactttgggacccggagcaagcatcgtcaaacggtgccgtgtatcctttgcaacggaaattcacccttcagcttaatgtgacgttttaatcccgtttcaattgtaacattatcataaatcgtataattatgaatttcagaaaaatatattgcatagccgctatggcactgatgtgttgcacaggaagtatgtttacttcctgcgacgattacctggatgtagactcatacttcgatgagatttttgagttagactctgtatttaaacgtaaggaatatctggaagaatatatcaatggtgccggaaagttattacctaacgaaggagatttgtggaccagcgcttggtcgccttatcaaggagcttcggatgagaactttacgtcgtggaatgactcccgtcacaaagccatccagctgatggtggacgaagtgactccacagagtgatttctataataactatggtacttggtataaaggtatccgtaaagccaatctcgtcttggagagaatcaatgaatgtgaggatattactacgagcgatttgcgtgactttatgggacgttgttacttcctgagagcttatttctactataagctggtagaagcatacggtcctgtgcccattgttcccgaaacgacttatgacgtggatgccagtgcggaaagcatgtcactggaaagagatacatatgaaaactgcatcaactatatttgcgagaatttcgagaaagcatacgaatatcttccttccagccgtacgtctaccctagtcaatctgcctacttcgggagcggcattggcattgatgggaagagtaagactgatcgaagcaagtccttggtacaacggaaatgagttttatgctgattggaagcgtacggacggcaccaactttatgcctcaagtcaaagacgaatccaaatggggaacagccgctcttcttgccaaacgtttgattaagggttcggaagctggtagctttaaatataagctgcacactgttgagagaaaactagacacgaagccgctgccggaaaatgtgcctgacgaaaactatcctaatggagcgggaggtatagatgcgcttcgttcttatgcttttatgttcaatggtgaaactccggcatacaataatgacgagtttatttatatgtgcggctactctagtacagcaggcgactctccggcatggattgctactcctacgagcctgggtggtggtaatgggttgaatattacttatgcgactgtgaaagctttccgtatggaagacggtagcgacatcaataactcaccactttatcccacaaattactgggaagccattggtggtagttcacagtctttctctgactatacacttccatccgatgctgctaagatgtttgataagatggaaatgcgtttctatgccagcgtaggttttaaccattgctactggagcggactttcttacatcggaaccgaaggtaatcaaactaagcagacagttacttactatgctaatggtactgctgcaccgtcgtccgatcatcctgaagattataaccacactggttttacctgcaagaagtacattcattatgtagaggatcagctgaaaggtatgatgaagtcgaaaactttcccgatcatgcgttatgcagaggtgctgctcaactatgtggaagcattgaatgagttgggaagtaatacatataccgatgaagagaatgggattacagtgagccgtgatgtggacgagatggtgaaatactttaatatggttcgctatagagccggtttgccggggattacagcggatgatgcaagggatgtgactacgatgcgggatttgattaagcgtgaaagacgtgtggagtttttctgtgaaggcagacgttatcacgatttgcgtagatggggagatgcgatcgatgcatacaatgagcctgtaacaggtatgaacattgctgcacgtagcacagaccgtaaagcattccatacggaaacagtgatcaataatactcgttcgcatcgtgtattctcttataaagattacttcctgcctatccctcgtacaacgatggataagaacccgaaactggttcagaatccgggatggtaattttgcacacgaagtacagaattaataattaagtaaaaaacgtttgttatgaatatcaataaaatactatatccgatacttttgttattggtcgttttaagtagctgtgattatgaaagcccgcttgataaggagcaatataagaagacgctctatctgatcggcgcttccagcaatcttgtgactaaagagcttgcttatagcagtgaagtgcaggaaggattcattacagtgggtgtaagtggctctcttttgattgacgggaatgtggatgtgactctggaaagccataacagtgtaattgactggtataataaaaagttcaagttccttgccaccgatatcaaatatcagggacttgctgccagtgcttttgaggtaccttcctatactactacattgaaagccggcgaaacttatgcgagagttccctttaaagttaaaacagaaggtctggagtgcgattcgctttatgcgataactttcaagattgcttcttcttctgccggttatgagatcaaccagaaggactcggcacttattgtatccttcaatctggtaaataaatactcaggtaattacatcttcaaggctcttcggcacgaactggatagtaatgatgaaatagttgcatccacttctattactatagtcagaacattgaaagctacagaagaaaatgcagtacgtttctataacgagcaacaggcggaaacaactgccaatatcaagaaacatgctgttgtactgaaagttgatgctagtaacaatgtcagtatctcggcatgggaggactttgacttgattgatggtacatgtacttataatcagaactcgaaagtctttaatgtagattataagtatactgcggatggcaagacttatcagatggtgggtacgtttacctatcaggatgaagatgcaggtagcaactaaatgagcttataaatctagtaactgaattaggttatcagcaaggtagaaaaaggtgttgctttaagtcgatgaaataataactggcaggttcaaggaattcttaaacctgccagtttgtttttattcagccttataatttgtgacattgcaagatttgtggtagtttttggtcgttttgtattccccaaagttagccgtaatcacgtatttttgtactatcactttaaaaattataaaaaacaaatttcacgatgaactataaattactgtcagtcgccttagcttttttatatataggtatggtaggcggatgttcccagcccgcccccgacctacgttatcagattgaagtggacaaacctctgcagacaatggaacacttcggcgcttccgatgcctggagtatgcatatccttggcttgtgggcgcaggagaaacaaaaccagatagccgactggctgttcagcacagagaacgatgcgaatggaaaaccgaaaggaatcggcttgtctctttggcgtttcaacgttggtgcaggtagtaccgagcaaagagaagccagtcagatcggttcttcgtggatgcgtaccgaatgctttatgaatgccgacggaacctacgactggaacaagcaacaggggcaacgcaactttttgaaactggcaaaagaacggggcgtcactaaattcctcgcatttctgaattcccctcccgtatattatactcagaacggtctggctaccaataccggtcgtggaggaaccgccaatctgaagccggaatgttacgagaaatatgcccgtttcctggccgatgtagtagaaggagtagagaagcacgacggaataaagttcaactatatctgtcctttcaacgaaccggacgggcattggaactgggtaggaccgaagcaggaaggctctccggcaaccaatcgggaagtagcccggaccgtccgtttgctgagccgggagtttgtgaaccggaaaatggatacgcagattatggtgaacgaatcttcggactatcgctgtatgctccgtacccatcagacggactggcagcgtggctatcagattcaggctttcttctgcccggacagtgtggatacgtatttgggtgatacgcccaatgtgccccgactgatgcttggtcatagctactggacaacgactcctctgagtgaactgcgtgccatgcgctgccaactgcgtgaagctttggataaatacaacgtcggcttctggcagtcagaaacctgtatcatggggaatgacgaagagataggcggcggtcacggcttcgaccgtacgatgaagacggcactttacgttgcccgtatcatccatcatgacatcgtgtatgcgggagcgaagagctggcagtggtggcgtgccgtcggcggtgattataaagacgggctgattcgggaatacacgaatgatgacttgaaggatggtcgggtagaagactccaaactcatgtgggctttgggtaattatagtcgtttcatccgtccgggagctgtccgcctgtcggtttctgctttcgatcaagcggggaatttaatccccggaggcgatacggaccaaaaaggactgatgtgttctgcttatcaaaatgcggacggctcatacgctgttgttctcattaactatgcgcaggaagacaaagagttttcaatcaataagataaatggcaagaaaactcgatggcaggtgtatcgcacttcggatgtagaaggagaagatctgctacccgttgagaaagtgaagagtggaagaacagttcggattccggcacgttcgattataactttattgaatcaatcgctttaatataagagtcaattatgggtttgtccggtcgaataaaaggccggtatgtcgcctttttcttttttaaagtattacatttgtacgcccgtccattgctaaccaaggcaatggacgggcgcaatgcataaaaaaggaggcattttatgaacgatagaggaaatattgtcatttatcagacaaaagatgggaagacttcaattgatgtgaagttggaggatgaaacagtgtggctgactcaggctcaaatggcagaattgtttcagaaggatcgtactgttataggcaggcatattaataatgtctatagggaaggtgaacttgaacgtgatatcacatgtgcaaaatttgcacatatgggtagttatagtgaccaacaatatgagacggctgtttataatttggatgtgattatctccgtcggctatcgtgtaaagtcgcaacgcggtacccaattccgcgtctgggcaaacaaagttttgaaagaatacctgatcaaaggctatgccgtcaatcagcaagtaaagatagagcaattggaagacttgaagaatactgttcacctcctttccaacgtcatcgagcacaagcaactaacattggatgaggctaacggactgttgcgtgtcattactgactacacttatggtctggacacacttgataaatacgatttccagcaactggaagtagtctccactactcccagccgggagtttcgtgccacctacgaagaagcgatgggcgctattcatttattgcaggaaaagtttggaagcagtgacttgtttggaaatgaaaaagaccaatcgttcaaaagttctatcaatactcattgcttttcttgttctggtgcagcatctctcacccttattgaagccatattctttctgtctttcccttattttacgttgtcttctacttccggcttaccataataccccggcatcggaatataaaccggactctgacgagtattgatattctgcaacttcttttcttctttcagtcgtttgatatgtcgggcggcagtggtaagcgtaagtttgcaaagtccttgaaagtccgagcgggtcagtatttggttattactgaaatacgcggtcagcagtctgtctatctcttcgttggagcgtggcactgagtgtaacttcagtttactgcgttccaccttgacgacgcttaccgaacttctcagttttttatccgccttgaagccgatgtttgctttgagtttcatttggtttgctttcagcttgggcgaggtgatcggttccagactgttcagctttacttgaaagtagccgatgccgtcgaggtgaacacgttccccttcccggaggcgtgatcccataaagtggctcagcgattcgaggacggcttttacatccccttcggtcagcgaagtcgcttgttgtatttctttggcgagatagtcggtgtcgatatgctgaaagttgactacccgtgcgtggtagagttccttgtcttcttcgtccttggggttgggagacttgtagagttcaaattgtattgccatgatactgtttattgtattttatttctttttcttcttctttgtttcggctgtcagtttcttgatactgtcaaaatatgcttcttctacaggcgacagggttttgacatgatatttttggtattcgcccagcgctttttgtttggcttgttcgtgagagatcgtgcctgcgttctgcaaaacttgctctccggtggtcgataagatgaggtccaggtgatgtatatagtccgacatatacatgggcgaacgtttgatggcttgtatttctgcgaagtcgaagtatccggaaaccaggttgttcagtatcttcagttccttttcattgagatagtttttagctatcagtacatcttctttccggggttgttcgccgggaaatgtggtcagtcccataaatggcttttctgcatcggctcgttcgaagatcacttctgctgctgtgtggccgtgggcggcatagtgtaacttattctgcacgattttgaaaaaccggatggattcgtctgcctttgggtcatagtctacactggtggcatacaagtcaagaacctgacggtagagtactttttcagatgaacggatgtcgcgtatacggttgagtagttcgtaccagtaaccgccgccgcccatttctttcagacgtttgtcgtccatggcgaaacctttgatcagatattctttcagacgttcggtggcccagcggcggaagtgggtggcttgtagggagttgactctatatccgactgatatgatggcatctaaattataaaactgtgtcttataattttttccatcgctcgcagtatgttccaaaatggaactaactgaattttcttctaattctccactttcaaagatatttctcaaatgctttgtgatagccggtctttgtacaccaaacagattggctatttgttgttgtgacagccaaacgttctcatcctccaaacggacttcaagttgtgtccttccgtcttctgtccggtatatgatgatctcaccgttgtttttctctatttcgtccattgctttacatcgttataacatattcgtcgtttcttgtttgttataaagatatagctacctttgatccgcaaaactaatcattagtttccggacttggacagaactcgggttatatagtgattgcctgcttgctgtcaagcgttcatacataagttatcctgcctttatctttggtttatgatgcctgcattgttggatgaaggtgcttgcatcattagttgttcacggccgtggtaaatgttgctcacggccgtgaagagcgttgattacggccgtggtaagagctgatcacggtcgtgaacaactagctatatcagtagcaaagataaactataatagggagataaacaaagtatccctgcttcttttgggtattcgtgcagcttgttctttgtgcagaggcaataagaaggggaaatcattcttgtatctcgtgcgatgaaggaacatagtctgttggctgtagacgattttgttcatctcccttctatttactcattttacttccttaatggtattcttattaggaaaatatgcctatatttgtggcgtatcttctaaaaaagatatgttttattgatttggagataacgtttttattatctgtgatgagaaatctggcacatttagcactagcaggtaataggcggtcagtctccacgtccacattgtatatatatttgttatatatctcaatgggcgtggagctattgcttattattctagtgcgggcttgccagagcctctcatgagatagtatagtaatagtttctgcgccttctttttggagatacgcaaatacacaaacaaataaaaaatagtagtgatgaatgattctacttgtccccgtccctgcctgatgaagcttgatttacaaagctccaccaataaacttgcctttttgaaagacaactggcccagctttggacagattgagagtatcgaccgattatcggaaacagaattacgatgtaccctttgcctgctggatgtggtgctggctgctttggctaaagatgaatgcttctgtccgaatcgggaaatcattcgtttggtattgacacgtacctatgtgcagaataggtgtgagctatgcgagacagaagaaatacgttcgaagttggtgaagggcttttgtacaagggagaagaagaacggattgagcaggaagaacaatatccggagaagagggatttctgttttttatggtgccatattgcgtatgctatctctattctcctccttcaggaaggaggagaatagagatactaccgacttttagtcagcctcatcggaagctccgatgaataaggagtttgacgaccaatggtgaaagatgacagatgaaagctcgttttttcgccaggaagtgattgtgtttattctactactatttgtttatctttatactggaagtgtgcgatgcctaaatcattcagtacattcagtagagtctttatcggaacattccggctgaaacggaaatggactcgtttgtgtaaaaggtctgcagaatggcagatgacgctgatattataccaggtccctatattttgcagtacggttatcatttcggtgttgtcataataaaactcatctttggtccatccttctttttctgtccgtgtggctttcgccagacgaatgtcgccgcttgtggtcagtgtggcacattgtccgggtactatttctttctcaatgggagaggctgctttgccgacctttactcgtccttgatacagggtgacggcgggggcattgccgggataggcatttacgtcgaatacggtgcccagcacttgtgtctgcattttatcggcagagacgatgaaggggcggtgggcgtctttggttacttcgaagcgtgcttctccggtgaggtttacggtgcggcttccctgagaggaaaactctttggggtattccagacggctgtttgcacttaaaaggacgtgacttccgtcctccaatgtgaggcgggtggttgtggcgggcggggtagatacgatgattctgccgttctcttcgatagtggtaatttgttccggtgcatggagggcggtgaagatttcgatgttctgcaggatgccgtccttgtctgtgatgtgccaaggggaccaaagtaacaataacagggcaatggctgctgccacaccaccggatagacagatgcggagataaagtttgcgtttctgctgtgcctgccgttgcaggaatgtgctccattcttcccggacttcgtccggcagaggcagatcacccaacgcttcaccaaaggcattttgcagacggcgtatttctgcgttttcagagaatggggtttggttgtccgttgccagtccacaactgttgctgtctgccggttcgcaactgttgctgtctgtcggttcagaactatcgctgtctgccagcctgcaactgtcgttgtctgctgtcagtccgtagccggaaccttcttctttgctggtacgtttttctttttcttccatagcgtgtcctccttctttattctttcatggcttcgcgtagtgtacgcaatgctttggatatatgtttttttaccgtgtcgggactgatgccgagttgttgggcgacttcccgataggtgagatgttcgtaatagcatagccgcaggatggtgcaagtcggttccggcaggcttcgggctatcgtttccgctttctgcaacagtgcttcgtgttcccgatagttactttttacatcggccagcgtcgcttcgtagagtgctttcgcattgtcccgttccacttgcagatgcttcatccggttgaggcaggtgttgcggactgctgtataaatccagcctccgcggtcggcctcgtccaattggtcgaagtgtttccaggcctgttccatcacttcgcttacgatgtcccgtgcttcctctccgtcgcccatcagttgtgaggcgtaacggaccattcgcgggtacatttccgtaaacatttgcccgaaggcctctcgttttgtctggtttttatggaacaggaacattctttatctggattctgaagctgcaaaaatagtacttttccctgagttcgactaaaaaatcagtagtaacctaagtagggggctgattaaaaagtcggtagtaactttaatgtgttcacctaccacctccccctacgggtactcctccttcccgaaggaggagattgggaatactattgactttttagtcagcctctcttgtgatggaaccgacttgttggtcatctttgtgaaaccgggaattacaaacgtgacttttcgcttgctccggctccggttcctttatatttgctctttgtggcgttgaactgatagctcagccggataccgaagcgctgctgatcggtatattcacgactggaactgaaggtacggtcgccatagatggtgaagtatctgtgggcggtgtgaaagatgtctttcgcggttagcgatactttcagcgcctggtctttcaggaacgatttggtcagttgggcatctactcttccttcggttttccagatggcgtaactttgtttggcaccgggcgccagttctcctttgatgttgaagaaccaacctttagggaagctgaaactattgtcaaaaatgaaatagaatcgcggttcattccagttttgggtgatgcctatggaggttgcgtgagagttgaaccagtcaataccggtggtgaactgaggttgccagatgccgatctttggcgaaaggacgatgctgcctccgtatcggttggtatgcggaatgcttgccatgccgaacagcaatacaccggggtgattgatgtcgtcatacgggcgggtgtagctggtgtacatattccagcaatggtcgtagctgaggctgaagttgacccatttccatccggcatcaaagaaagtcgcacgatgtatctgggggacgagaaacggatctccactccggtaggagtatttgttctgataggtgatggcgctggtgagcatatcatagctgggactgtatttcagcgtacggtgagaaagggcgaagaaccagttgccggaagtgtatctgatgctgactaccggtatccagtcgcgataggtggggctttggtcgtcttggtgaacccctttctcgtagtaatctgtttgttgaaattcataacgcagtccggccaggatgttgaattttcccagcgacaggatgtagtcgatgaatccggagagcatcgtttgtttgatgcggtcgtcggcatcggcggagaagccgctttggagaaatacatcgtggcggttggtgaatgtctcttctgtgccgaaactgagtttgcctttccagagtggggcggtgagcagcagtttggcggcatagaggtggttgcgtacgcggttgctcgaagtggcgtcttcggttccgttgttttcggcatattgacggatgcggtcccggccgtacaggtagtcggcgttgaagtcgatgttccatttgccgaaagtgccgttgtagtatccgttggctgcctgccaccagccggtgtgggcatctgtttggcggagagcgtgcaggtggtctacttctttgccgtcttgtaggatgagggttgtcccttcattggtagtatgtgcattgcctatgttcgtgccgggcatgtagcgcatgccgaatgactggtcttcgtctatttcgtagttgaatcccagttcgccgttgaaggtgcgataggtttgtttgcttttgtcttctgtcgattggttccagttggatgaagcataaatgtcctggctggaggtgcccgttctgtaattattgatttccgcaaagtcgccttttacgaaaatatccagtccgccggtacggtagttcagggatatgccttcgttgccgatcggttcgcgtccttgcgagtagtcggtgtagaaactgccgctcattccctgtccgcgtttgcggatggtgcgcagacggatgacagcgcctaccgaagagccatattgtacgcccggtgtggtgatgatttctgccgatagtatttcattggcttgcagacggtccagttcggtcttgtctctaaccttgcggccgttgatatagatttcaggagttcctctgcccagtacggtaaattctccgtccgagccggtgacaaaagggaggtgggagatcatttctttggccgatcccatcagtgaaaggggcgttccggctatgttggccttcaacgttccgtctttgcgttctatcagcgggcgggaggcggtgatgactacttctttcagtagctctgtgtcgggttgcaggcggatggtgttttgttgccggcaggggatgatttgcgggcggtatcctatgtaggtcgctttcagcagacagtcttctcccgctaccgggggcagatggaaggagccgtcttcttcggtcacgcttccggcaaggaaactggaatcggcggcaagggcgaggatgttgacaaagggcaggggggctcctttttcgtcatatactttgcctgctatggcgatggctttgtccgacttcttccgctgcacgacgaaatactcttcccgttcgatgcaaaggaagggtttgccggccagtacaaggtcgatggcttcgcgttccgtcttttcgcggatgctgacggtcacccgataactttctgttccgttgtaggtgaagaggatgttttttcctcctgccttttccaactgcttcagtgcttcgggcaggctttcgttctttagctctagtgagaatttcttgatggcggtctgcgcctgcaaaggggagagggcaaaaaataaaccgtatcccatcagtaaccagctgattgctgtccaagtaaaaccaaactgtcgtatcatacttctgttttaatgattttacttatactacaaccaaggtgtctgatcgggtacggtttatccgttttatttttcgatgtttatttcaacttcttctgatactctcccgaacggaggatttccaatgctttctgcacgctttcgttcgttgtattcatgacgcggaaatattcgttcatatcccagaggtcacgggctatcagtgctttgagctgtgtcttgatcagcggaagtgccttctgatactgctcttcgttaaacttcaccccttctttctcacccatttcgcggagggtggcgagcatatcgtcgtcaataacaaacttttcgttgaagctgtcgaacttcttatatttatcggccagttccttgcggtggtcttcgatgaatttcattgtgaatttgatgatgactcctttgccgaccagtttccggtgatagtccgtgtagagtgtcgtatcaatcggaacgaagtagtccggcatgatgccacctccgccgtagacggtacgtttcagtttcttggtctgcactttcaatgagtcggggaagtggatgctgtcggcattcatcagttctccgtggttgaagcggtctatcaggtctttattgtaatcggtcgagctgtcatacggcttttggatgcaacgaccggcaggggtgtagtaccgtgcaatggtcagtcggatcatggagccgtccggcaggtcgataggacgttgcaccagtcctttgccgaaagaacgtcggcctacgatgatacctctgtcccagtcctgcactgcgccgctcacgatttcgctggcggaagcggtgtattcgtctaccagtacaatgaggcggccgtcacggaactctccgtttcctttggcgaagaactcgctgcgctgtgcggtccggccttcggtgtaaacaatcagttccttctgtccgaggaattcgttggcaaggtcgatggcggcgttcagatatcctccgccgttgccttgcaggtcgaggatgaggtctttcatgccttgcttttgcaggtctttcattgctttcttaaattcttcggcggtggttgcgccaaagcggttgatgcggatgtatccgatctttggctgaatcatgtaggaagcgtcgagactcaggataggtatcttatctcttttcacggtgaacacgagcgggtcttgtactccacggcggacgatggtcaggttgactttcgaacctttcgggccacgcaggcgcttcatgatatcttccgtgctcatttttactcctgcgatggcggagtcgttgacggcaatgatgcggtcgccggcaaggatgcccactttctcggaggggccgttgctgacgggttgtacgacgagtagggtgtcctcgatcatctggaactgtacgccgatgccttcgaagttgccttgaagcggttcgttcatcttcttcacttcttcggcatccgagtaagtggagtgcgggtcgagctgtgccagcatcttgatgatagcttcttctaccagtttgtcttcatctactttgtctacgtagaagttggaaatcgcgaattccgccatttggagtttgcgcatggcggcagagccgaaactttgggcctgtgcagcagacgttgccaacagacaaaccaggagggcgtatactttaatcttcttcatcatcattaattattatttcaagtttcgcaagttacctttgcgttatccaaactatcttcattcccctgaggctgactttaaagtcagcctcaatagagatactaccgactttcaatttatctccattccttcggggataaactggctgatatctttgttgtaagtcagcagctcgcgtacaatcgttgagctgacgcaggtcagttccggttctgtgaagagcaggatggtttcgatgcccgccagtttacggttgatgtccgcgattgtttcttcgtactcgaaatccttgaccgtgcggatgccgcgaacgatgaattgtgcttctacctgttgggcaaagtctatcgtcagacagtcgtaagacatcactttgatgcggggattgtccttgtagagattccggatcatttcttctcttttctcgatggggaaataggtattcttgttttcgttgataccgatcccgatgatcacctcgtccataaaggtgagtgcacgttccactaccgaataatgaccgatggtgaaggggtcgaatgtacccggaaatattgcttttctcatgatgccaagtcttcttctataaccagattgtctataataaagttctgtcgttccattgtattcttgcccatgtagaattccaggagttcttttacggcatctgtcttacgcaatgtcacttgttccaggcgcatatccttgccgataaagtgcttgaattcgtccggtgatatttctcccagtcccttgaatcgggtgatttccgggttggggcttagttcgttgatggcgttcacccgttcgtcctcgctgtagcagtacaccgttttcttcttgttgcgtacgcggaataacggcgtttgcagaatatatacgtgacctttcttgatgaggtcggggaagaattgcaggaagaacgtgatgagcagcaggcggatgtgcataccgtccacatcggcatcggtggcaacgatcactttgttgtaacggagtccttctatgccgtcttctatatttaacgcagcttgcagcaggttgaactcttcgttttcgtagactacctttttcgtcagtccgaacgagttcagcggtttaccgcgaaggctgaatactgcctgagtgtttacgtcacggcttttggtgatggaaccgctcgccgagtctccctcggtgatgaagatgcaggagtcttcttccattcctttccctttcgggtcgttgaggtggatgcggcagtcgcgcaacttgcggttgtgcaggttggccttcttggcacgttcgcgtgccagcttcgtgacgcctgcgatggctttccgttccttttccgattcctgtatcttttgctgcattacttccgctacgtccgcgtttttgtgcaggaagttgtccacttccagtttgatgaagtcgcctacgtatttgttgactgtcacgccgccgggagtcatgttggtagatcccagtttcgttttggtctggctttcgaagatcggctcttccacattgacggcgatggcggcaaccagtccgttacggatgtcggtatagtccatgttcttgttgaagaactctttgatggtacgggcgatatgttctttgaaagcactctgatgggtacccccctgtgtggtgtgctgaccgttgacgaaggagtaatattcttctccgtactgtccggtgtgagtgaaggcgatttcgatgtcttctcctttcaggtggacgatgggatagaggccggttgccgtcatgttgtcgttcagcaggtctaccagaccgttgcgcgacaggatgcggtgaccgttgtaaatgatggcgagtcccgtgttgaggtacgtatagttacgcaacatggtctcgataaattcgggcttgaagcagtagttgacgaacagcgtattgtccggttcgaagaagataaaggttccgttgtcctcttcggtgtcctgcgtcacgtcggtctgcaggtttcctttggagaatgtggcgatacgcactttaccgtcacggtaactgcgtacttcaaaacgagagctcaatgcgttgacggctttcacaccgacaccgttcagtccgacgcttttcttaaatgccttgctgtcgtatttaccacccgtattcagtacgcttacggcttctaccagctttccctgcgggatgcctcgtccgtagtcgcgtacgctgacgcggaggttctcttcaacggtaatttcgattttcttaccggcttgcattttgaactcgtcgatactgttgtcaatgacttctttgaggaggacatagattccgtcttcggcgtgcgcgccatcgcccagcctaccgatgtacataccggggcgtgtgcgcacatgttccatgtcgctcaggtggcggatgttgtcgtcagtgtactctactgcattgttgttgtctacagatatcaattcgttctcttccatagctgttatttaatctctttggtgaacgcacggcggcgcttatgttgcttagtctcaaagtaatcccattgtgcctgaacttttccgttcagttccagttcggggttgctttccgcaaagataaaacctaatttttgataaactggaattaaatcggaaaataacaaagcgttaacacctttattctggtactccggtttgactgctacaagcagcaggtcaagcattttggcacggcgtttcatgaacagtgctttcagcagatagaaccatccgagagggagcagacggccgtgcgacttttgcagggcctcggcaagagacggcatggagatgcctacgcataccagcttatcgtcggcgtcggtaatgagggtaaccatccgtaagtcgagaatcgggagatacatctttacgtactggttgatttgccgttgcgtcagcggagagtagccgtagagcgggctgtatgcttcgttcatcagttcgaagatttcctgtccgtagtctttggctatttttcttccggaggtgtacttctttatcttcaggttgtattttcgttgaatcagttcggagatacgcttgtgcttgtcggggatggcatcggggatgtagattttgtattccacccagtcggcgtctttctcgaaaccgagtctctccatgtgtacggggtaatacgggtggttgtagatagtagccattgtgctgagctggtcgaatccttcgatcagcattccttccgcatcgaaatcggtgaatcccagaggacctgtgatgtgagtcatgccgcgctcttttccccactcttcgacggtcttgatgagcgcggatgatacttcggggtcatcaatgaaatctatccatccgaaacggacgttcttgcattcccacttttcgttggcgcggttattgatgatagcggccacacgacctacgattttgtcgtcccggtatgccaggaagtaatctgcttcacagaactcgaatgccgcattcttctttttgttgaatgtgttgagcatatcgtcgtaaaggtcgggcacggaatatggattgcccttatacattctgtaattaaagcgaataaacttcttaagttctctctttgtagagactttcttgattgtaatagccatatctcgtatttatgattgaggggcaaagatacgtgataatctttaaattacaacgctgcgggtggagaaaactgcgtgaggcgggatgtactttattcttctgccgcttttgacgacaggcaataaacattacccgcaaagtcgcaaacaatcatcctgtttcccgatactgctactgtggagaaaaccggtgctccgaagtacaacttgtctttgataatccctgttgactggtcgatagcgtataaatgcccgtcggaagctccgatatagactattccttgtgaagatacagggcttgtttctactgctgcctgtggcgtagaagaataaggagcagtgtatacaagagaaggtaaagtctcggctctccatttgatgaaaagagtcggtttgtcgagagcgaagattccacggtctgcgctgccgaagataatctcatgttcggtgacaagcggggtagatgtcacgtccaagttggcggacagttccttttgctggagtactttaccggtttgaggttctatcaggaaaaagcttttggaggagatgatccataattttccgtctctgtagaccggagaggcacctcggttgccgagtccgttgtccgagagtttccagagttgtttgccagtgcggatgtcgttgccatacagtcctccccattgggtgccactgattagtacgtctccggcgatggttaacgtggtggtcgagccttcccgttgtttccagtccgtgttggtccatatcacttttcctgttttcaggtcgtaggctgaaagtccggcgccgattccggcataaacgattcctttgtcaactgtcagtccttcgctcagatagggatagttctttaagttgatgtattgttgccacagtggttttccggatgctgcgtcgagggcgtacagattgcaggaggcatcctgggctacaacgatttcattttcgcaggcaatcgtattctttaccgagttttccgtgcggaacttccatagctgtttgccggaatggaagtcgaatgcacaaatataggtgttgagcgatgtgttatcatcggtagtggcaatgaatactttttgtccgacgatgaggggggaggccatgaagatgttgcttcctgtgttcgctgtccattgtagttgcagggggagtttgatttgggaatcatttattccgccggagtgacttgcgttctgaagtagggtattccagtccttccctgtgatagcagtcgatttgaaatctttctgataaaggaactggttggtggcagtcgcttcctttccgtcgttgaaggatgaagtcactgtcaggttcagtttctttccgttttcgttagcaggtatttgaatatttccgctccagttccagtcggtgaggggcgacaggttacctttggctatttcccggttgtcttccggattgctcagcagataagaaacagacgatgtttttgcctgtgagttataggtgttgaccgagaccggaagttgatagccggtttccggatgtatgggggctgcttgattcttcatcggagaaacaatagcgatttgcggttcgatgaaagtataacgcagttgcgttgtgaggtgatcgttggcatctatctttatgtctctgaatgaagaaggggagtgatcgatgcctcctttgtccagtgtgccggtgcagatggtataaatgcctttctgattgcggacgtagttgtagtgcatatgtccgtagatttgtgctttcgtgttgaacgtacggaggtcgaggatatccttttcgtctgccttgaatacgaagttatcgccgggagtaaacaggtcgtggttaaaaagaacaagcgcctgatctttcttcatcagggcgaggtcattcttcagccagttgtatacatccctttgcgtgtaatcggtcgggttgtctccgtggtcgatgggggtaacgacgtaatgcacgttgccgacatcgaacgaataccatgtcgggccataaatcgattcataaagttcttcgccgtagttgcctttcaccaggtcgtggttgcctatgcagtaatagacggggcagtccattgtttgtgcattcacaatttgattgtgcattgtgagtcccggttcgtagcagatgtctccggtatgaatcagaaaagccggttgttcgttctttatgtattgttgtaagtcggtgacccaacgccccactcctccggtcacttccgtgtcggtgatatggataaaggagtgttctctggtcttggtccgttcgctttcggtcactataaaatcatagctttttctgtcctccttgacagggaggtagaattgttgtgtctcgaatccggcaggtgtagtaatgctgataaatcgggttttcttgaatcccgatagtgagaaccggccttttttatctgtttttactacgttcattccgtctgttaccatcactcctgccagcggtttgtctcctttgtcgaatgtgcccgattgattggtgtcgacatagacggttcctttaaattgtgcgcacagcggaagatatagtaaaaatgacaagagtattacggatagtcttttcatagtcggttctctgttttattaggcacgatgacacgggttaacgtggtttttaattgaccgatcttttaaatccgtgaaatccgtgtcatccgtgcctaaatttatgatataaattaattatgctgatacttatcgtatttgtttcatctcttcgttgtatctcgcttcctccttacacaaaggcttgtaccaggtctttcttaatatcagcgtggtaatcagaagcaaggcgatagaactccagagtcctaactgttcgcggacaacgaggtacattgggatgatggtaagcgtacattgccagatgattcctatcgccacattgaaggcatctcttttgaagtttttattcgcctgaatatgcgggtagcgggcgattgctttctcctgaatcggtttccaccatccccacgggcgtacattgacatagaagttgatcagagtctcttcatctgtagccggagcgctgtaagtcccgatgatacatccgatcagagagacgccgaacagtacggggaagaaataaagtacccatgcatccggaacggtaaatttcatcacaatagctgccactactccggcagtcattccccaaaagtaaccttcaccgttgaaacgccaccaatgccatttcagtacgttggctgcgatgtatcctccgaacagtgcacctacaatccactggaagatttcattgatatctttcaggaagaatccgatgacagtgctcaccaccactactgccacagagatgacataactgctgcgtatctgagttttcacgcttgctttcggattgatgtatttcagataaatatcatttacgatatatgcgggggctgcattgacggtagaggcaaaggtcgacatgaaagctgccagtagacctgccaataataatcctgcaagtcctgccggaacatatcgtgtgatcagatggggaagaatcgtctcaaagtctgtgcgggtcacttccatctgtgtcagtccgccgtcttccttgaagaaatagatggcaagtaatgcaaatcccataatcatcagataacggggaatcaatagcacgacggatacggaaccgctcatcatcgctgcttctttgggagacttgcaggacagaattttctgcatatcatagttgggcgcaggccctgccatactcatgaagatgcctttgagcaacgccatcatgacaaagatgcctatcagactgtaaggttcgttcgccattcgttcggtcagcaaactcatccggctgctccagtcaatatcgagcgtccatccgaagaaaggggaatcccatccggcaggtacaaaggagtgtatcatatccggcgccaccatctgcataccgatcactacgataacgatgcctgccaccgtcatgataaggaactgtacgacatccgtccatacgatgctcagcattcctcccaacatgacgtagaaggtagcgatagctgtgaagaagataccgtatacatgcggaacatactccggtgaaacagtgaaaggaatgtagggtgagatgacttcccagggaataaagatttccatgaatttgcctattcctatgaatccgtaacttagaaatccgagtacgcttaataacgcaaatacgacaacgatggtatgagagagtgtcgctcccttgcctttaccgaagcgggttttgatccattcggctccggtgagcacattggaacgccgcaaccacaccgacagataaaccatgaggaatatctgattgaataccggccacagccagggaatccagagacttttgaatccgtaggcaaatgcccagtaaaccattagcatcgtaccagtgatgtcgaacatcccggatgcattggacaggccaagcatatagaagggcagtgatttgcctcccaggaaataggagtccatattttgtgcggcccgttttttcagtatgagtccgatgacaatcatggcaatgaggtaggcgcagatgatcagaagatcggatgtgtgtaatttcatgttgctattttgattaggttttgtacattaataatctatcaggtacaaaagtaggtcgaatgtggggaagaaacaaatattattttaactcatactgatactatttatctgacttctcaggctttaatagctgacacgtcaggtgttaagacttgacgtgtcagatgttaataccctgcaactcagttgttaatatccatcatgcagaatggaacatcttgaaagacagatgataatactgcttccggaactataatataacggcattttccgacatcacgagcttattggcttctatgatatcgtatatgcttttcacggaagtcgtggaacggagtctgtcttccggtgtatgccggcagtaatcgattagccgttcgatcgtagaagtcgctacgtgcatccgtgtgtcggaggaagcatagtagatgtataccgttccgtcttcatctgcgatccatccgttggagaataacacgttggatacatctccggttctttcttctcccacgggtgccatgaagtaacctcccggctgggctatcactttactggggtcatctaaagacgtcatatacagatataggacatatctgagcccggctgcacaggcacggactccgtgtgccagatgtagccatccttcgggagtcttgatgggatgaggcccttcaccgtttttcacttctttgatcgtgtgataatggcgctgttctataacgatttccttcttgaccactgcatgagtgatatcgtctatcaatgcccatgaaataccgcctccgctgcctgcatcgatgaatccgtcctgcggacgggtgtacaatgcatatttgccgtctacgaattcggggtgcagcaccacattccgttgctggctttgggagacgaggttgggcaggcgttcccagtttttaaggtccctgctgcgtatgattcctgctgctgcaatggccgatgtgaggtctcctgcgggtgcgtccggatctttgctttccgagcagaagataccgtatatccatccgtcctcgtgttttgtcagacgcatatcgtagacgttcgtttcttccggatataggtccggcagttgtaccggatattcccagaagcggaagttgtcgataccattgggactttctgcgatggcaaagaatgatttgcggtcatgcccttctactcgtgccataataagatatttcccgttgaatttgatagcgcctgcattgaatacggcgttaatgccgaaacgttccatcagatagggatttgtttccggattgaagtcgtatctccactccagcggggggtggtctgctgtcagaatggggtatttgtatcgttcaaaaacaccattgccgggcagtatcttttcattttcacgtgagatgagctcatcatattctttagtgagaatatgtagtctgttatcatatctattcatatcaattcataaaattagagtaaagcatcggcttgcgatcctttttgtattacttgacaggacaaaagagactgtttacaagccagacatacctgagatatacggtgttgtagggacagtctctttgtacttttgtcattttgaaagtatgggggtactttcaaaaaatacatgtgtcaagtctataaactattgtttggtaatcatataagagcggatggtacaattgggttctaagaagctgacccagtaccaaccatcttccactttatcgatccggcaatcttctatcggatatttcacttttttgtccactgcatttcttgttactttatacagtaccgcatcacctttgttgcctttcgtcaaatcacctgtaaactgaactgcaaaaccgctggcataagttcctgttccttttataacaatttcggacatattgaactcttccgaatgagtaatggaacccactgccgaggtagagacagactgataagaagatgaacctgctattaagtaacgatatgatggattctccagatataggtcgtcgatatagactatattgatgctgattgactctccttcctggtctttgattgttaccgtcttgttgaaacgatatcttttaagaccttcgatgataacatctgttccattttccgctatcgtgcatttcagataagtggcagaaccattatttgtgcaggtatagcctccgttaccgtccagaatcttgattgtcaaaggttcaccgactgtcaaataagcaatttcttcactattgtcaactacaagtttctttattacttttactgaaaattctgcactcttgttcagtctgtcggtcactgtaactgttgcattgcctggtgccagagattctatctgtatatgtccttcttcatctactgtagctttcacgacagattctttgtcaactgttactttgtagcctctgtttcctgtataaacattgactgtcttgttttcacccggatacattgttgtagccgaattggacaaaaccagttcacttaactgatcgacgatgactttgacattggtactcattttagcccagtcggtaatagataagtcggtactaccggctttcagagctgttactttaattttgttaccttcggcaatggcggttgctacatcttcattggaacttgtaattttataattgccgttgccttgaactatttgaatgattccttccggggtctcatccagattaatgatcaactcctgcgtattcggcactaagtcgtgataggatggatcatcgtcattacagccggagaaaacagtagcggctgcaagcaggaatcctgccaaatataatagatttcttttcatgatattcattgtttatttagactatttattcagcttcaatatctttcattttaccagtgatggttactacactaaacttagggactgtaatggagcgcaatccgctgagagatggatttacttttttgcgttgccacttaactccttcatctgatgtatacgagatcatggtctgaaactcttttccttcaatttccagtttggtttcgaaggccttgcttgtagaattgtttaccagtacgatcgtataattgtcgtccttgatgtaagctgtcatcaacagttctttcgggaatgcttcttcgtcaccttcgggagcaacagtcttgatatccacacgtcggcttccttccgggataaacttagtaaattgtccgtaactgtagtagcgggacgctctttcataattggttccgggaagtgcttcttccagtctgatcaacgcttcattattcgtacaaggacgtgcacctgcccaccagataaatgcgttcaggttggaaactgccagataattatggaaagtagtagcccattgcatcgcgtttttccaggatggatcgtatgtgtctgtagaactggtttccgtattccataaatgaatattattttcagcgcagagtggtgattgtacaaactcagtgttgccaattaatgtgtatccgtgagctgctgcaataatgttggagttaaccagatcgggacaggctttcaagccattttcaagaaaagtgactcctgctttccaccacgagtgctctccaaagataatcttcatgtcttgataacctgttttatctaaagccgggcgaagattcttctggcagaagttagccagattggtataactccagctacaaccgttccatcccgttccactgctgttaggctcattagatggtgatattgcatatatctcaatgccgaacttttcagtgtatgctttgatgaagtcaatcagatagttagcatatgcgtcttccgaaccggatgccagactaccgcctgagggctttccgttagatttcatagttccgggaggactccaggtagagaatataaatttcacatctttatattttttctgcaggatatctaccagccacatttgacctaattgtacttgttcgccacatccggaaccgttaaagtctctccagtaatcattgatcatagagggatcgttggctgcaagattgaaggtacggttcattccgaagtcaatgacgtttgtggtagggttctgatagtgtggaaatacctcacctctgaaaatattcagcttcaagccattttctccgaaaagatcattgactacatcttcgcgcatcatgttgttccatatacgatgtgaccactctgcaaaggcacatccgaagccatcgattatctgatgttcgtgcccttctccgaactgtactttgatgacagcttctgtggtgggttcggctgagaatccgtcatcctcgtctgtttcttctaccgggtccggaatgtagacgtcactgtgactcagacttccatcgtcacaagagtatccaatgaatagaaagagggatacgaataataatgaatatatctttttcatgttgtttctttattaagttaatcttgctaggttttttatttccataaaccggtttgttccatggcagtattattgtttagttcacttgtcggtataggataataaaggtgtttttcctggaagttttccgcaccttgttttccattcgccttgaagatcaactgaatttcgctgggcgaataccaacgtttcaaatcgtcaaaacgatgtccttccgcaaagaactccaataagcattggtgttctatttcattcattaattcagcttgtgcaaaagtcttttccgtaagtcctgctctttggcggatttgctttaaagcatagttggcaccatccggatcattggttttggcgcatgcttcagcataaagcaacagtacctcggcaaagcgcattacgcgcaaattgctggaccttccttctttgttgcccatgttgtccggtgccttgtcatccacataatatgcagtatttttctttatcaggaacttacctgctgtcccattgacgttgaaacttggtgctccgcctgccatttttccttcattgccttcccaaagatcatccatggagtaattatttccataccatttctcgttaggaactttatctccatagttggcagcatcaaaaaagaggctggcatacatacgtttgtcaaacttggtatctgcatcactcggacgtgtttcttttgtaaactctcctacgatcagggagttcggcattaatttagcccatccgccggattttaccggaccgataaactgaggaatatagcaacctaaacagataccgctttcattgctccaggagtagtctccgtccggactgtatgccagttcaaatacggattctttattgaactcttcttcatttgtgaaattcttttcgaagttgtccatcaattcgtaagaataaggagctttcagtaatgtacctaatagctgtttggcttccggatatttgtgttgggtggcatatactttgcccagcattgcaatagctgcacctttagttatgcgttctttggcagtagagcgttctactggcaggttgcatttgatggcgttatccagatcttcttctacttgtgcccataatgcagcttctgtagcagcggctttattggtttcatcttcgttggatggaatcagtctcaaaggcacttctttgtaattgttgactaacaggaagtattgatagccacgcagaaagagtgcttcgcctttgatcatcgagcggtcttcttcagtaatacctgatgcaggtatctgatcaatataccgcagtacgatgttggcacgctggatgcctgaataaagcgctccgtaaggatcatttccggtagagggcgagttcaggaagtttgcaatattccacatcggaacttcttctcctttgattgtgtagatatcgtcaccacgaccgtttaagtttagccagccgtcaaatgcgccgaagtatccgtacatggctccttttatcggagaataggcggctgccaaagcactttctgcatctgctttatctttccagaagttgctttccgtgaagtaattggggtccgacagattcaaaaagctggattcgttgcacgatgtcagcgctccggaaaaaagagctgccatgcacatatatgataaccaatttcttttcatgttcataaactgtttaatgtttaatattaatttaaggtattacaggttgacttgtattccgaaagaaatagtacggggcaatggatagcgtccctggtcgatacctcttgagaatacattgtaagcaacacctgcgacagaactttcacccaggtcgggggtatagccggaatatttggtcaatgtgaacaggttctccattgaagtgtatattcttacgttttcaagtttgattttctttgtcaggactttgggtaatgtatagccaatgtccaatgttttcaaacgtatgtacgagccgtcttccagccatctgtcggtgtatgcccatttgttgtctgcaccgtcagtcttagagaaacgaggaatatcagtgttctgattgtccggtctccatgaattggccaatacggtactcatatttccgttgaagtttcctgattccaggcgataacggggataattatatatcttgttgcctaccattccgtcaaagaaaaggttaaagtcgaagttgttccattcgccgccgagtcttatgccaaaagtgaaatcggggaacggacttcctacgtcatgctggtcatctgtgtttattttgccgtcaccgttccagtctttgtagcggacatcaccaacttgtgcagcgggctggatgagttcaccgtctttgtttttataattagcgatctcttctgccgagcggaataatccgtctgtttcgatcaggttgaaatatgacatcggatgcccttctgcaaacatattgataccgcgaccaccggcaccgtgtgcgctgtatccggagatcatcaggttttgtccgcctaatgttattttggtcacttcattcttgtcggctgcgatattggcaccgatgtaatagttgaacttttccttgatggcaccgcgatagttgaccgcaagttcgaatcctttgttccgtacttgtcccgcattctgaatagagtttccgctgataccggtagatgcggtagaaggaataggtaatagcacatcatttgtattcttaacgtaagcatcagcagtaagcgtcaatcgtccgtttagcagactgacatctaaaccgatgttataggtctccgtattttcccatgttaaattggcgggtgagattgcctgcacatatggcatagaaccaaaccaaggcgaattattcatcacatagttcatgccgtccgatactacactttgtgtcggatagtagctggtcatctcctgattaccgagtttaccataactaaaacgcagcttcaactgatcgaatacattctctaaaggtttaaagaatttttcgcggttgatgttccatccaatagaagcagaagggaatgcaccatattgatgtccacttctgaaacgtgaagaaccgtcacggcgaatagatgccgagaataaataacggtcgtcaaaggaatacatgacacgtccgaacagagataccaatgcaagttcattcagcgaactggatgctttcaggttggaaggatctacattgcccggcattgtttcaatgaactggggcatatctccatttttaccataaaggctgtaacttttgtctttctgggcagagtatccggcaaggagtgacaaattgtgtttgccgaatgtacggtcataattcagggtgttttctaatacccatgattcccatgttgacgatttttcttcaaggtcgggcttgtcgtttttaccgaatgttcctaaatcgtatacatccttgtaataacgccacttagtatgctcttttctgatacctacattgagtttgtactttagtcctttgatgatttcagcctgtaaataggcattgaggaaaatcttggttgtttctgtccgttcgtcgttgactgtcatttcagccaatggattcggtaaattgatgtcattggaagtaccccagctccctgcgtttgtaggatcgtataccggtactactgacgggaactgaaagatatcgaacatggtatcctgatgaatgtatccactaccttttgtcagatttacaatcatagattcacctgttgtcaagcgattgtcgaagaaagaataatcgcttttcaaacggatattgtaagattcatgatcagtgttgcgcagtataccttctttattaaggtagctgacagatgaactgtaagaaccacttttggaaccgccgctgatggtagcattggctttataagtcatggctgtgcgcaacatcacgtcttgccagtctgttccttcaccaatgaaaggggtagctccgttttctgcaccataaccgtcgcctgctaatttgtagtagcgtgcgaagcggctgtattcttttccattaaaaactttcagtgttttgggagtctggctgattcctgtgaagaaattgacatctaatttagtcggcatgtctttacgaccgcttttagtggtaatcagtacaacaccacctgctgcacgtgaaccgtagattgctgccgcagcagcatcttttaaaacttcgatagaggaaatatcgttaggatcgaccatactgatatctccaaatgctccgtctactacataaagtggattgttgttggataaagaactgataccacgtacattgatcgtcatacttccattgggatcaccactggaactggctactgatactccgggtattttcccttgtagggctgtggctgcgttagaagcaacctgaccgttaagttcttttgcactaaccgaacctacagctcccgaaagatgactcttcttcactgtaccataaccaatcactactacttgttccagagcgatattatcttcttccatagatacattgattggagttccggacgtgacagctttttctatttgtttcatacctattgttgagaatatcagtatattccctttattcgctttgatggagtatttaccatccatgtctgttactgtgccggtgtctttacctttcactctgactgtgactcctggtaagggttcatttgttgtagcttctgttaccattccttttatttcaatatcctgggctgccagtggaatgctagtcaggcaaagaaaaaagaatagtagaaaataaatttttcttctcataatttattgtattagattataaactctattcaattgttgattgatccatggaaacttcaaccaataactgatgatgcaaaagtaggcgataatgctccgtcagacaagtagtattttatcatttactaatacaattctatcgtattgtattttaatttgaataaacaaaagataagatgtcctatcagagtgtttgaatgctgctttaatcagttggattgcttattaagaatgtcaaaagagtacattttatgattgaagttatattatgttgtgttgccgggggacaaaggtataaggatatgtatgttgatgcaagtgttattcggtaattaacagctgtggaggtgtgatttctattacttataggaaataaaactattatgactgctcattttgttacttataagaaatagtatttataatctcctatcttatgagcgtggatagataaataaaaaaggagaagccagttattttagcttctccttttcccttcctgttaatcatcctaaatgattatttgaaaacaatctccatgggtctacctatccaaacttgtggttgttctaaatgaaagatgcgggcgatggtggacgccacatcgtattgcatcatgcttacatcgtcaaaccggagtcctttcttaatattcttgccggatatgatgaaagcagtttccatttcttgcatggtttttccgccatgacctttatcgatacctccgtgatcggaagttaatatgaaaatggtatcatccagcattcctgcgtcttttaccgcctgaacgatttggccgacatacacatccagttctttaagtttctcgtaatattccggtgtgtcgtgtccggcagtgtgtccggtgtggtcggggccgtcatagcagatggcaacaagagcggggtgtttctcctttatataagaagaagccatattgcccagttctttcggagtcttgttgcagtcggcaacatgataatgataacttaaagacagcgtatctactaaatatttaattccttcccattcatacaggcagccgatttccgcttccgggcgggcatcgcgcagtaattggaaaacagtagggaagataccattcttatttaatacacgtgagggaagttccggtgttttagatccccattcggtgtatccgtgaagttccggtccggctcccataaacatggatgcccagttgatggcgctggaagaggggagggcagaacgctttttcagtgtgtaagctccgtcctccatcagtttctttacgttcggcatatctgctttgggaaggctgtaggctccccaaccgtccaaaccgatgaaaacaacatgtttagctttatcttttcctttggcatggcaggagaaagtgaaactgaagaggagtgcgaatgtagcaagtagtgttaaaaaggtttgtttattcatgatattgttatttatagggttaatgttttattcgttatctaatcaaaggccataactaatgatgagcaaaggtaggattattttaaggggaagacaaatataatattagcagatactaatacttttatggtatttcttttgaatttctgtcttttgcttggcattgttttcttcattgtcaaattatgtcgtttgtctttttgtatataatattgatcgttttaataactgttctgttcaactatgaatatcctttcagcttggctgcaataatatccttacagttttataataaaccgtttgagcgtttttaataaatagttgagaggtttattataaacggtatccaagtttattaaaaactatttttgggaaatttctgagtaaccttggaattatataaacaaaaagggagaaaatcagtgctgattttctcccttccaattcctttatagatggaaacagatgccttattggatgctattatgtcttatattttatacgtttcatattgtttttcttctttttactaccttcaaagatacaaaataaaaaaggaaaagtcaagagctggctgtgataaaacagtttccgatgtgaatggacaatagtttccagtacgactggaaactattataagacgctgattctcacttattctttatgataagaatgatctttcggaaactcttctccttcccatgcttttttcgaagtccaggattgtgaagcatccgtccagaagggatcatcggcagacagacctagcgggagaaaagcaagcgatgccatatacaagctgccgttattagtgtaataatccgaaataccgggctgggaaccgttgaatcctagtgtcagaaaacctgccgcattgaagttgcgaccgtctccgaacatacgttggatgacagccgtcatggctgcgcgtacctgtccgtttgataattcttcgggaagccagttgcgccacgcaagcagcgctaatgtctgcaaagagccggtacggtaagtgatagaacgtccgaaaacaggtagcgtaccttccggagagatgaggcgttcgaggattactccgaatcgttgggcacgtctgatcgcttcatggaagttgcagccgggcatatttcctattttctcacgtttaccggcttcggtgattacctccagtgcttctatatacataggatgtatgacgaagctattgtaatagtcgaatgcgaaacgaggtccgtccgaataccagccgtcacctacgtaccattcttctatcttgcgcagagaggaactgatgcggtaagtgtcactgggcgcacctgctttccgaaggaaggactctacggtggcgctgaacaacagccagttgctataagaaggatcaactcgtctgagatcagtaaattcggcgatataccgctgcttggtgatactgtccaatggcatccataaggcatcataacttctcaggaaactttctgccaggaaggcggcatccaccaaggtctgattctcctgacgccataacagataatcgggggaagcgggatctaccgcgttagcatagcttttcaatgcccattcccgcagttgtttgcgttggagtccttccggagtttcatcgtcgggcaatgacagccacggtgccagtcccgccattaggcgaccgaagcattccatataagtgacgttctgattgcgcccgtcccatgtaggacttaattctacgagcatattctgtttcagcagaccttcgctcatgttgcttaatacaggagcagccatccggtacattacgtcgcaccagatttctctgtcacttttctctgttttctttttggcactgatactttctgtcgggatcagcagaatcattaatagtaagatccaatgaagtcttttcatgtattgccttatttttaagattaaatctacggctatggagacatagctgaagtatatggcaaaggtagaattattccgacagcagggcaaatacaatcttagcattaactaatacttttgcgttatttatccgatactgatactttcttatacaaaatgaccggtaaataatgcttgtcaccggatttgttatacatttgtccggtaaacaaaattattactatgaaaaggaattggataggtagtagcatgatagttgcactctttgctttattggcaagcggatgcggtcatagtcaacggacgctggagtttcgcggaatctgtgtagatgatccgcagggagaaaatggattatataacccgggcaggggattccggctggaaactgcggtggatgtgctgcatgaaaaagacactcctaccaaagaactgaatgaattgtctgctaaatatgtagcagatagtgtttcactctcacagagctacttttatctgacttatttaataggtaaagagctgtctgaagaaaacttccggaccatgcaggcatattttgatgaactgcaaaagcaaggaaaaaaggccgtattgcgttttgcctacgaacgcgactttatgggacggtcgcctgtcggtcctaccggcgaacagatactggcgcacttggatcagttgaaacctttcctggagaaaaataaagatctgattctggtcgtacaagccggaatgattggcgcatggggcgaatggcacagttcggttcagggactggaaaactcgaaagaaacaaaagctgccgtattggaaaaactgctttctgtggttcctgccgagagaaatgtacaagtcagactcccggaatttaagaatctgctgaaagataaaccggaactgtacaagagactttctttccatgatgacttcattgtcatacgccccgacagatgggatgccgatatgcacgaagggacaccgaagttcgatcagatagtggcggaatctccttacctcgtagtagacggtgaactgccctggggattctggagtgtgggcgctgatccggacagtccttctgccggatggattattgacggtctgcaagtggcaagacgtttattcctccagcattatacttcgttaagcatcatacataactataaggagcaacatcccaacaagcggttcgacgagaataatccgcccgaatactctatggtggtttggaagaaaacgatgataacggaagactccctcctccaacatcatatgccggtgtccgacagctacttccggaagaaagacggaacgaaggtaaaacgcaatgtgttcgattatatacgcgatcatctgggttaccggattgagctgcaatcacttcagcttccttccaaattcgtgagtggaaaggagaacgtcttgaaactgagcttgaagaacagaggttttgccaccgtatttggtgaacatcctgtttatttcgtattgattgatgatgcaggagaggttacggaatttccggccgatgccaatccaaataattggcaaccattcgaaccaaaggattctacctatacttcgctgacgcatacagtggatgtatcccttgaacttcctgcctcgctgactgccggaacttataagttaggtctgtggataccggacggatcggagagactcagatataatcctcgttatgccatccattgtgccaatggagatacggactggtggatttctaaggatggaaagtatggcgtgaatgtattgactgcggttgaagtggaataaatgatttgtttctatgataaaagtgaaaggcttcgggtatgattaccggaagccttttattgttgggtatggattaccttatcaagaattataaatcagcaccaccgtatatgccacatagcaaaatatcataatgcttccttctatccgtgtaatggtccgcttggcaaagaacagcccgaacagccaaagcagaatgctggaacctactagtgtgaacaggtcgaagtttgtaattccgctaagatggaggggcgtgatactggcgctgcatcccaatacaaagaagatattgaagagattactgccgattacatttccgatagccatttccggattcttttttagcgcagctacgatggaagtggcaagctcaggcagggaagttcctccggctaccagcgttaatccgataatggattcgctgactcccatgctgcgggcaatccctgtagctccgttgacgaacagctgacctccatagatgagtgccgccagtccgccaatgatatagagaatggatttccaccacgaaagcagcttgatctcttcttccggtgccgtgtgttccggtgctgccggttccggtgcagcggaagattttgggaaagcgatggcaaacgtataccccatgaagatggcgaagaagcagagtaaaagcagaccgtctactctgttcagtatattttctgtggcattatcgaggaatatgtcattggcgcatatcagcaataccacagacgaaaggatacagagcggtatctcttttcgtaaagtgttccgggtgatgataatcggagcgaacagtgccgtacatcccacgatcatcagcgtattgaatatgttacttcctactacattacctatggcaatgtccgcgcttcctttcagggctgaagcgacactcaccgtcagttccggagcggacgtgccgaaagcgacaatggtcagtccgataacgatggaaggtatgcggaaacgtttggctacggaagcggcaccgtctgtcagtccgttagctcctagtaaaatgagaattaatcctccgataagtaatagtatattcataatttttctcttttggggcaaagataatcatttagggaattgttatgtcaaaaacaatccgtatgtttgccatgtttattaaaaagtgaaattaaagttaattcacctaacttggaatcattctatatggatatgaaaaaaataaaacggtttgcattgctgctcataatggcttcccttgcagtcaatgtacaggcgcaactggagcaggcagtcaagaagattttcgccggagatacagtagcaacgcatccagtctctttgcatcgggattctgattctgcccgtgtggcaaatctgcagaaatcattggaagaagcgcggctcaatgaagccaatatgcgtatggagatggagcagatgaggcttcagatgctgtccgccgattcggtgaaattctcccagcaacggcagcgtatcgactcactgcgtcaattcacgaaaggaataccggtagttgccgaaggggataccctgttttatctttttacaaaacggggcggatacactccccagcagcgggcacagatgaccggtgccgctattgaagagataggaaagcgttttaatctccgtcccgattccgtttccatcgaccattcggatattgtttccgacctgatgtatggcaataaagtattgttatctcttacagatcaggatgctttgtgggaaggagtctcccgtgactcccttgccaaagagaggcggcagaatgtaatcaccaaactgcatgagatgaaagcggagcacagtatctggcgaatggcgaagcgtatcctttattttttgttggtgattgtcggtcagtatctccttttccgtctgactaactgggcatttcgcaaactgaaagtacgcatcctgcgtctgaaagatacgaagataaagcctgtgtctatccagggatatgagttgctggatgctcaaaaacaagccaatctgttagtctttttggcaggcatcggacgttatatccttatggggatacaactgttgattactgtccctttgatttttatcatcttcccgcagaccgaaggactggcataccgcttgctgggttatatctggaatccgattcggaaaatctttgtggatattatagactatattcccaatctgtttacaattattgttatctggtacgcggtgaggtatctggtgcgtctggtactttatctagctcgtgagatagaagcggggcgtcttaaattcaacggcttttacccggattgggcaatgccgaccttccacatcgtccggttcctgctctacgcatttatgattgcgatgatttacccttatctgccgggttctgattcaggggtattccaagggatttcggtctttgtcggattgattgtctctctcggatcaagtaccgttatcggaaatattattgccggactggtgattacttatatgcgcccgttcaaaatgggcgaccggattaaactgaacgatactaccggcgatatcatagagaaaacaccccttgtcacccgtatccgcactccgaaaaatgaggtggtgacggtgcctaactcttttattatgtcttcacataccgtgaattatagtacatcggcacgggagtatggcttgattatccattcggaggtatccatcggttatgatgtcccctggcggcaggtcaatcagatactgattgatgctgcgttgaatacgcccggagtagtggatgacccgcgcccgttcgtgctggagacttcgttgagcgactggtatccggtgtatcagatcaatgcttatatcaaggaggcgcataagatgtctcagatttattctgatttgcatcagactattcaggataagtttaatgaagcgggaatcgagattatgtctccgcattacatggctgtccgtgacgggaatgcaacgacgactcccaaggatgatctaagcaagagtaaccctgcggatactgctaatcagagtaaccaatcagaataatataagttcattacttaatgaacttatattattctttgcatctgtcggggcaaaggagtactataataaatcagggcgcccccttcatcgcgaaggagacgccctttgtcgtgtgtgttttttctgagagtagaatttctttctttaatagagaacttatttttttcgggttactgtataaagtacatttccttttttatctatcatacgcaggttaagctccttcttgtcgatagagcaaacggagaaacccggttcggggctacagaactttgtaccttcgatgggttctacctttcgtgcgagggaggcggcggagttgaccacatagtcaatgtcgcttcccggtacacggatatgctggaagttgtggatatgaccgcagatgtacatatctacgttgtgcttgcgcaggatgctgtctacgcgtttctgcatatcaagccgctcgctttcctcttttggggtgtaggcatagatggggtgatggccgactacgatgatccagtcctccttggcacttgccagtacagattccagccatgacagctgtttgctgatgtcctgcttgcaggcatccggatatttatcgctttcattgcggtatttatcaatcagcggagtggtgtctatccagacgatgcggatagtagctcctttttcttcgaataccttggtgtagtaacggtcgggcatcgaccagcggcggctgatgttcgtatagtccagtactgcctgagtgcttccacggtattcgtggttgcctaagatggagaaccagttgatcatcagttcggggtgggagtagataagctcgtagttggtcatccacaaagggtcgttcacgctgcgcactccgtcgaagtggtgaacgtctccggtggctaatacaaattcggggcctatctcttcgcccattgtgcccatcagttcggcgattggcttttggtcatagtagccgttgcgacctaaatcattggctacatagaagttaaacttcttgtcaaagatagaataatccgtgagctgtgcgtgggcgaatgtaaagacggaaagaaaaagaagaatgaataagctttttatcttcatattatattgattattagttgtttataattgttattattgaaaggctgaaattctctgttcttttggttttaaaggaaggaggcgttggtttaaaaccaagaccccgttcctttaaaaccaacggggcgttccattcttaggaacggaggttttctctttgcgtgctgtcagaagttaacttttacgccggcattaatctttacaccgtagtactccgcctgcatggtgcggtctttggttccctgatagtaacgaagaggctggttcagcaggttggtggcgtctgcatagaacgtggtctttatcttcttgccgaaggtgtagctggcgttcaggtccatgtagctcactgcgtcatagtaacggtcgagagctgccacttctcccatttcgtcgatgaagctcgaagcgtagttgtaggagaagcgtacgttgaagcctttcttttcgaagtaaagggaagcattggctgtatgttcgggtgatcccggcagggacaggtctttctcgttctcacgaccttcgaagttgaagttgttcacttgggtgtgggtgtaggtgtacgtaccatagaaaccgatacatttcagtgcgggggcgatgaagccgaagtcgcgttgataggccagttctacgcccagtaggtcggcgtcgccggcgttcttgggttgggtgaacttcttgtattcgttgttctgataggtgtagtcaccgatgacctgatcgacgataaagtcattgatctttttgtagaagatacctgcgctgatcagaccgacacttttgaagtagtagtctgcgctgaggtcgaagttgtaggagatggtcggggtcaggtcggagttacccatcaccagttcgttgtcgctgcggttgatgttgacacaggggatcaatgcggagtatttcgggcggctcagtgtctcggtgaacgaagcgcggagcattaagtcgtcgtttacatcgtatttgaacaagaggctggggagccagttgacatagctgttcttatggtttccggtaggttcgagagtttctgtctcgtctttgtcgtcggctacgttccagttccagccgttgtatttgatgtgggtggcttccatgcgtaagcctgccatcatttttatcttctttcccaagttctggtcgaagcggaagaaggcggaagttacgttctcacgggcgtggtagttgccggaggattcttcgagcacctgttcgccttccatactgctgaggtcgagtgagcccagatattctttggatacgaaataggtcgccttatattgatttcccggcatatatccgtcacgaatctggctggtgaggttgttcatgtaatccttgtcaaaagcgtccttgtacgcatctgcgtaatcatagcagagggtgttgcggtctttggtcttggaggcgtactttgctccgaaccgcaggctgttgccatagatgccgtttgtcagcggaagttcgaagtcgactttgaacttcaggtctttttcgtagatttcctgattgctttcggttagttccttcactttccatttgcccctttcgccgtctgcttctccgttgtgcaggttgacgtccgtagtcacgtaagggaagcggtcgccggcatctacgacggtaaagccgaggaagtcctgtttcagactgaagtatctttcgttcggacggtcttcgctggcacgggcgtaagaagctccccagttgacggatagtttgccgaactgatgttcaccgctcagactgaggtccattgtttgctgtaattccagacgggcgtttctgttgtcgggtgttcctccttttgtctcgatctgggcggattgctgcatatctccttcgtcgtctagtcctgtcttatccaaatccttataggtgacgcggtagcggttttcccagtcgtggcgacggttgtagataccttgcaacgtcagccggtggttcgggttgatgttgtagtcgaaagccagggagtagctttggcgttcgcgggtcacatagtactggcgtttctgtgcttccaccatgactacttcgccttttttgttgacgtcatattcaaactccacatcgtccgatcctgacggagcgttctgataagagatggcggccatcattcccagtttgtcattgaagaaacggtcgccgtaggtaaatcctaagttcagctgtgctttctggctgatccagttgtagccggttcctgctgtggcgctgaacatccgtttgtaaggagtgcttttcgtcaccagattgatggagccgccgatggcatctccgtccatatccgaggtaacgactttgttcacttcgattgtttgcaccatgtcggcggggatgaggtcgagctggacattacgggtatcgccttcggcagaagggaggcggttgccgttgatggtcacggaactgaggtcggcggaagtaccgcggacttgtccgaagcgggcttctccctgatcgtattgtacattaataccgttgatacgtttgagggcgtcgccgatattggaatcggggaactttccgacctgatcggctgaaacgacattggtgattccgaggttgttcttttgtgagttgatggcgcggcgttgtccctgaaaggcgccgcctaccactacttcctgcagttcgagcccttcattgagtacgacgtccttttcgagtgtctttcctgccggaatagtgattttcatttcgacgggagagtagcctacgtagctgactttcacggtgtatgtgcccggtgtgagattggcgaatgtataataaccgttgacgtcgcttgtcactccggtatgtagtttttcgatgtagatggaggctcccggaagaatttgcttggaagtgtctactatgcgtccgcggatcgtgccctgtctggctacgtttactttttcctctgcaaaagtatttccgcttgtactcatgattaaaagagtcaaagagactaatctgagaaatcgtttcataaatgttagcgtgcgttaattatttgctgcaaaagtaggggcttgacgtttcttgctttttacagttgattgaagaacgcgtaacaaatatgctacgattgtgttacgcaagaagggcgcccgcctgcggacacccttcgatacctaacccgataaaaagttatcttgaatgtatctgagatacgatcaattcattggaatttcgatacgttcgcccgtaacggaaacggcgcttaaccggaaaccatctttccagcgaaccggaatggtgaatgtatctacagacgaaggggtattttcgccgctgcagatgaggacgaatttgccggtttcatccctcacttcgtacgtcactacattggtccagttcttgatcgtgatggtctcaccgttgtaagtcaccgcattgtcgccggaacctaccgtaaatgtcttgggagcatgagtggcattttctcctttgatgatggcgggcttcgttttatacagttcgtacgtgttatccgagatgtattctagagcgacatccggacgggtgcctcccagtgcgttcactttctgtttgagagcgtttatcatgtcttgtgtcacggtcagttgctttttcccgtagtcgtccagttctttgtctaccggagtcaggaatccccatttagtgaagaagtcgagcaagttcataccggaaatcttggagcaggcatatacaaagtcgagctgaatttctccgtgagtcattctggtgtagtctttattgcgggcgtattcatatacttccggataaaaacctcctttgtccgcctgttgcaacggagtcctgcccagcaccttcccgaaatagagttccagttgccagaagggaacgagcttacagaatacatcgttggcattattctttcccagattctggaagtcggcatgcggacttccggcagcgataatcccactccatgctttggagtatctgtttcggtaggtgattcccatgtcttcgacctgtatgcgggagggctggccgaaaatggtggtctgtatgtactcggacataatgttgttcgtcacttccgtgttgccgccccacaatactcccggacgggtctgattgcaatgtcctatctcgtgtgccggtccccagcaagcgcttgtcttcagcttttccggactacagatttcattcattgttgttcggttgtaggctgtgtgataggctgtggcgtacatataggaatgatacatgacattcagatacatccggtttctgaacatcttgtcatatttctccaagcccagcaactgctgctcgctgtacacgatcttgtcataaaggtctatcagttcatctcccttggaacctgtgtatgtccggaggtcactcgtctcgaaagtgaggtgggcatatttccccagtacgtcaaaataccggttggttgctttgttgagcagttccgaccagcgtccgttatgctccgggttttgtgagtcgaagtagccgttcacttttcccgatgcaaaatggattttgacaggggccgctgccggatcatccagcgtttttgtgacatacatcacgtacaccagcccttgttcgctgatagtaaacttgttgattccctgattcagtaagtaggtcactccgccaaaaccgtcattctcaggtgcatccagattctgtacccgcagtccgatgtcatatccgtgtgtgtctcccaccagtacaatcaggttttcacctgccttgaccgatattccggtcggattgtccaactggctgtaagggttggtcttgtgggtttccgactggatatccggattggggtatgccttgaactcgctgatacggaattctgcgggatacttgcctttaatcatatagtaggctatattcttaaagaacgggtattcgcactgcgctatgtcatcttccgtaataccggttttcagttcactgcaacttgcatctgtgaagagagtcgaataatcaaagttcacgggattctttgcaaagaactccatctcggcgcatgaagcaaatccttgtccgtcaccggaaccactttttacgatgaaacggaaagactttgcctgtatcgtttggtcaaatgttactttgcctgccgtagctgagccttgaaaatctttatccaatagttttgtgaatgtgtgaccgtctgctgaatattgtatttctgtttctttgaatctaccattatttccgttattgcgcggatgatatatcaaataatcgatatctgtgactgtttcaaaattataggttaatgtgatggggaaatagttgcttgcaccattactccaattggaatgataaagtgtcgaataatctccgtcaaaagatttttcgatgttgctgccggattgaaaagaagaagccgttccgcttactattttgatcttgatgtcaccttttacgtcttctccgttgccttcggcaaattcgttgagtcctttctgagtaacaaatacggatgcgcttacaggttctgcctgttccgtatcgggatcgatagtcggtaatacttctgttatttcaatgttgccatgacgctgactgtcaagtccggtcgctttcaccatatatgtatggggggtggtgactgtggccggtgcacggctggcaggtttcgcggtaatccattccggcaaagtgatggctacttctacatttgtcgtcacgtcaaactggatttctccaccgataacacctacctcgaagctggactggtcaaccagaatggctgcttcgtatcccaactggcgtactgtgattgtctttgtctggtcggcagctatcacggtaacggttgctttacgcacgtaccgttcttcactttcgtctacagatattatcagtgtcttcccgtctgctgacgggtggcaccaatttttatctgatttgacagtccaggtatccacattggtagtgacagctacattctggctaccggactcactattaaaatcaactgtctcttttccaacggttaaattgggggttgaagagccgtcatcgtcagagcatgccgtagacaggcatggcagcaacgataatagaaagaaaagcagtatatatttcttcattcttttttttattcaagtacgaccattgaacattgatagatttccagttctcctaaagcaaaataaggagtgcccttcgtggtctctgtcacttcgaaccaaagatagcgggaaggttttgacagcggaattacctctgagttgtacacttcgctcactccgtcgggaagtcctgttaaggtagtttccttgtgggtacctgcctgtgagatatccactgtgttgccatcaattttctcgacgccatcaaaccattctgctggattataactatcacttgtatataggttgatcgttttccatgaactatcgttcgcacggttggtattggtcgaacggaatttaatagcgctgacttcttcgcctaaatctactaccagataatgtggcatttccactagtgagctccaccacgagtggaagaaggttgctatatttccgtctaccaggtctttgatcggacgggtaggaaatggagcattcgtccatattttcttatagtccagatctatctttacgggagtgccaaacgtaggacttgccttttctgcttgtgcagttatctgatggatggtgcctgcggtgttgccacgattgaaggcttgtacggtgaagttgatttcaccgtacttttggagcagattgtctattaccagttcatcggcatattgactgacttgttttctatatgactttcctgtggctccgatggtatattctatctgtacataatataagttttcatcggcagggttggtccagctcagggtaatctgtcccggagcgggagtcgctttcagattttcgatgtcgctgggtaccggataggaatctttgtcatcgctgcaagaccagagcatggctaatcctccgataagacatatcgtcataagtatctttttcataatcagattgtttttaataattgttattcatcattgattagtaacccggattctgcaccatgttcgggttcttgcttacttcacctgccggaataggcatcagatactggcggggggcgtcgaatgtgcgcttgtcctgtatctccacaatcttggcgaagtcttccagtgtctcggcaagaatgttcagaccacgtactttgacattgaagtaagtatctgccatcttccagcggcggatatcccaaaagttgtgattttcctgataaagctcgatcatgcgttcctgtctgacgattttcatcactctgccgtcgggaccgcattgaccgtcatagcttgtcaaaggaactttggcatttgcccagctttccagtactgatttgagtccggcgcgttcgcgtactttgtccagataagccattcctttttcgggatagccttctttaccgtatcctacacaggcttcggcatagttcaggtaaagttcggcgagacgtatcacaggccacggatattctaccgttggtccgggggtaccaacggtagcttgtatccctgggtgtacaccttttttgttcaggtatcctgttttggagtagttctgagagcgtgctgcagtgacaatctttccgtcatcggctctgacaccgcagttttctgttgccagaaatccggtcaaccacttgtctccttcagaacgctcagcgccccagaatttgtgataagcatatcttttatcgtctgtacgacattcataataaccgttctcaaaagcaatccacgcatagaatcggggttcgcggttcatgttcatgtataatgttctttttcccggttcggcataggtaatgccttcggggatggttacgacatccagcttattgcttgtactgaatgccgggtcctcgtcaatcggcaatccattggctgtgtagaagcggtcgagcatggtaatagtgggggctataccattccacgaaccacgggggaagaaaggtatggatttacgttggataccataagcacctgctttacgggtttcggggaagatgacttctttgaaattctcgctatccataaaggtcatacgaagtgtgcgttctgtcaggttcgtcggttccggataagcattacttgtagtactggctttatagagctcgtgaccggctcctaatgcagcctgaatagcttcccatgttgcgtctgctgcacgtttgtatttttcttccgaataagtggtcggcatgagctgttcaccgtccgggttcttaaagtctgcgtaatcaggattcccgttgaataatggtgaggcggcataaagcaacatacgtgcttttaagcttttggcaatgacgcttgtggcacgtccataatccgagctattgcgtgtggcaggaagtctggtagctgcatcgtcaagtaagtcggcaacccagtcgatacattcatcgtacggacgacgtccgagcatattattcgcgggagtgtcaagtgccggaagttctttcaccaaaatactcggtccgtagcatttgatcagaaggaggtggaaataggcgatcaggaagtcggcttctgctgtgtaaagatcgacttcttcctggctgattttaggtacggagttgatgttctctttcagcaaatagcattgacgtattccctggaaaagtgtattccaatagctgataatcgtgttgcttgagtcataggaaccttcggcgaattttacgtaactttcagaaaacgggctgatcgtttcgtcaccggtaaagtccatacatgtctcgactttgtttgactgaggaagatatccgtagcaggaatataaatatcgtagtgcggcacggggattggcaaaggcatccttttccgtggctgtttcgtcgggaacgatatccagatagttacaggaagtattcagccctgtaatcaataagaggatgaatagatatagtgtattctttttcatatctttaaggtattatttgttgttaatagtcatttggaatccaatgttgaatacgcgctgggtcggatatgaaagaccactgccaccaccctgttcaggatcccacaggtcgaacggagcaaaggtcagcaggttggagccgctgatgtacaagcgcatatttttataggtatagccgatttctgcattctttaacttcaggaaggcaccgttacgctcccaatagctggacaacttgttgttattattattggttttgcgtgacaagcgcgggtaagtcgcattggtattctgattgtcgggactccaacgttcgtctgccacccatgatagtacgttgcgcagcatattgtcaccgaaaggatggaaatcctttaccatgaaggaggttctggctactccctggaagaagaaggagaaatccagattcttccatttaatagacggaccgaatccatatacaatttccggtacgccgggatgttttgcccatacccagtcgtctgtatctgtcaggttatcatcatatccgtaccagtctcttgaaatattgatatatttgatatctcccggaatcactgccgctcctaattgttgttggtggttggcaatatccgctgcatcaatgaagagtccgtcggcaatataaatggcattcttattggcactgactccgatttttgactgccatggatattttggcgattcgtcatattgggtgatttcattatgcgcatatgtgaaagttcctttgaagctgacgaaccagtttttgttgaactgcttgttatagctggctgctaattcaaatccctgattgcgcatagctgccaggttgccgtatactttagtggtagccgtacccatatatgtcggagtggtccctttttcctggaagatgtcgcgacgattttcgcggaagatatcaaaagtaaggtccagagagtggaacaattgtaaatcgactccaaagttaattttctctcctacctcccatgtaatatcttcattggcataacgttgataaacgggaccattgtaggtcacattctgattgacacctgttgtaaatcctttgccgcccaggtcaatttgtgacatgtagataaaacggctgccgttaatctggtcattacctaccagaccccacgaaccacgtagcttcaatttagaaacaacatttttcaaaggtttgaagaaagattcttcgctgatgttataacctgcggcaatggaagggaacagaccgaaacggtgtcctttggcaaagttttccgacccattgtatcctacgttcacttcagccatatactttccggcataagcgtaggaggcacgtgctgcaagaccttgtttgcgttgaggcaatgaaccgataaagtttccatcgcccggtgtgttgttaacaagttcgtcctgactatagattagcatcgcattgacgtcatgttcaccgaatgtacgactgtaattgaccattccttccaaatagaaacggcggtcgccggaatttgtattctttgcggtcaggtttgtcgtatattcgtctccaatacgacttgttgtgtaggtgtagccaccattgccatcgtcttcgtatccggtcagtgcgaatttgttccactttccttcacgcttgttttcggaactcgaccagtttttgaatgaagccagtgctttgaaactcagaccttcggtgatgaaatccaacttctggttaaattccagtgctgcaatgactgtgctttggaagcctttgttgtagcctgtagcagcctgagctaccgggttggtttgatagtcagcgttgacacgttctgtagctccccattttatataaggtgtttcaccgtcatccgggaaatatactggaaattcaacaggtgatgtattcatggcattgttaaagatggctcctactccctggttaggagtagtcatgtcacgcaattgtacgttcaggcgcaaggataacttagaagaattgctcaatttggcattgatgttattctggaagttatagcgcatgatttcaatgttattattataggaaaagaaatcctttgaacgatttttcaacatgccggattcgtggttgacagagatactggagaagtagtctacacgtttaccaccgccacggatgttaaagttgaacttttcgctgtaagaagcgtctttgaatagttcgtcataccagtttacgttcggatagatataagggttcaatccggcacgtgtgccgtcaattctatcctgactgtaaaggacgtcaccgctattgtcattgtttacggcctcgttgaaaagttccatataagtagcaccgtctacgaatttaggagtgctggtcggttgagacatctgtgcttccatgcggaagttgatgatcggcttatccagattcatacccgatttggtggttacaatcatcacaccgttggcaccacgggtaccgtacatcgctgttgcggtagcatctttcaggatagagaaactatcgataatctcaggatcaagattattcaagtcacttgaacttacctgtacaccatccagaataattagtggatcggtgactccgttcatggtcgaaacaccgcgaatccaaaagttggcgccatcagctcccggctgaccacttttctggacggcaataacacctgccagacgtccggcaaatgcagtagacagattggtagaaggtacctttagttcagccggtttgatagattcaacagagcctaccatgctggctttcttttgtcctgtaccataagctgtgatgactacttcttccaactgcttggcatcttcattcaaatcgatggataacactttgcgtgaaccgatcttgatttctttgggagtgtatcctacataagaaatgagaataacatccgaaggggcagccataatcgtgaactttccgtcaatgttggtgattactcctgtagcagcccctttgatttgtacggaagcaccgatgatggattcacctgtgttggcgtcgactaccacacctacgatttccgactttttcggtccctgactcttttgctgaacagcctctgctttcgcgcttttcaagataatctcattgttcttgatgacatagtcgattccgctgttactgaatacttttcttaaaacttcattaatgtctccttcgcaatcgtagtcctttttctcgtcattggcgataacaccggacttgaagaagaaagtgtactggctattttcttcaatcagctgaatagcctgttgcatggtgatagactgacccttgagaatgattctctttccttgtgcgccatgagcgtagagagccattggaaggaagcaaatcaatagaacggcatatctgagtatgctgttactaaaatgcatgtttttcatgtttctaaaaggttaatagtgaatatattgataattgattcttatgtattaatataatatgatgttgttattttcttgtttttcttttaaatcgaggctgatacatatcttttcgatgatattggtaagcggctcgtctttacgtatagttccgttaaacttcagctctttgagcttttcttctttaattatgatgtttacatggtatgaacggttgataaaatcgatgaattcctgtaatggcttgttggtaaagcgatatttacttgagcgccagtcatactcgttgatatctatattcgtgcgtacaactgatttggcctgggtattgtatacgattcgttcgttcggttgcatcggcagttctcgctgtccttcctctgcctggaatttgatggagccggtgaataaggtaatttccgattccatgtgcccggctttgatgttgaattccgttccggtcacttcaatacgcgattcccggaaataaaccctgaagggtgctccctgagcttttttcactttaaagaaagcttctcctttttccaggaagatttctctgttgttcagaaatgacttgtgatagcgaatttgagaagctgcgttgagccatacttccgaactgtccggcagcatgactgccagcttatcattcattggagcactgatattaatgtcggatgatgaaatattgttggcaatccaaaagccgataatgaagatggcaacagtggcagcgatggaatatccgatacgatagtatttcttgtttctctctaaaggctgtttttcgttccggcatctgaccataatcttattgagtatggtgtgcgggggaacatgatcttgtatatgagctttaggagctttatcccattgttgagactgaaagttaaccataggcttctcattgagaagctgttccctttcggaagttgtcagtctgtcggctaacatcttttttataatattaatgagttctattgaattcacgcccttatatattagtgataatgattgttattgacttcggttacatactaaatactccccatattacatttacccctatcggatataaaaaaaaatgtgttttatttttgtatcttttaaataatgtatagctttgttgtcactaatatttgcacaaatatgaacgaaagagaaagagtattggctattaagggcggtgatcatcaggcgtttattgatttgtataacgagtattggagtcaggtttatgactttagccgattgtacatcgctacaattgctgatgcagaggaaattgttcaggatgtgtttgtgaagttgtgggaatcaaggcatttactgaaggaagatgaaaatatcaaaggttttctctttattgttacccgaaacatcgtatttaataaaaataagaagagagtaaatgagaatcttttcaaaacctctgttttggtagcctatggaaacgaaggttattataactccactactgtggaggaggattattgtgcttcccaactaaaaaatttcattgatcggttaatcaattcacttcctgagcaacaaagaaaatgtttcctgttgagtcgtgaagaaaatctgagttacaaggagatagccgagagacttggtattagtcagaagactgtagaaatacatatgggtaaggccttgaaattcttgaaagataaggtgaaacgaggctgggagattctattgtcgcttctttcattttagttataaaaataagacattccttctttctcattatttaatagtgtcggaatagacttatcttttttcttgctgttcttagcaggctgttactttatctgtattttcaatagcctcttttcttttcagatagactttctgaagtagtcagattattaatgatgtaatagaaactcatgtacttttggctataatcaagttttgaggctgatagtaataagctttgattcgcaaaaattatttagtaataaaaatagttggaaaaaagtttggtatggcagctttttttgcactacatttatcattcatcgctgtttcaagttaggcgtttccatttgaacagataaatccgacagcattccccgatcatagttattgtatttgaaaacaatgattagaatgtagtttttcgatgtggaattgcaaggtaacataataaataaagctttaattaatttggacaaaatgaaaaaagtactgttaactttaagtttgagtatcgttgcgtcgatgggcagtttcgcgcagaatgaaccctataagaatccgaaacttgctccggaagagcgtgcggaagacttaatagggagattaaccttgaaagaaaaagtaggattgatgaaaaactcttcttttgcggtagaacggctaggggttgctccctataattggtggagcgaggctttgcatggtgttgcccgcaatggactggctacagtgtttccgataactatgggtatggcatctacctttgatgatgaagcaattgaaagagtgtatgttgccgtcagtgatgaaggacgtgctaaattccacgatgcacatcgccgtaaccgctatggatatggaaacgaagggcttactttttggaatccgaatgtgaatattttccgtgatccgcgttggggaaggggacaggagactttcggtgaagacccttatctgaccacccgtatgggagtagctgtagtaaagggaatgcaggggccggcagatgccgaatatgacaaggctcatgcgtgtgtcaagcattatgcagtgcatagtggtcctgaggcgaaacgtcactcttttgatgtagaagacctctctccccgtgatctatgggagacttaccttccggctttcaaggctttggtgcaagaggcagacgtgaaggaagtgatgtgcgcttatcaacgcctggaaggagagccctgttgtggtagcaaccggttgttaacgcaaatattgagggatgaatggggatataaacatttggttgtaagtgattgcggtgctattgatgatttttttgtgaaaggccgccatgagacacataaagatgctgccgatgccagtgcttctgctgtgatcaatggaactgaccttgaatgtggttcgatatattcgcatttggaggaagctgtaaagcagggattaatcacagaagaacgtatagacacaagtttgcgtcgtttgttgaaagcccgttttgctttgggcgagatggatccggattctatcgttccctggagcagaattagtatagatactgtggattgtgatttgcacaaacagatggcgttggatctggcacgtaaatctatggtattgctttgcaataatggcgtgcttccgttggcaaaaacaggggcacgtatcgcagtgatgggaccgaatgcggttgattcggtgatgcaatggggaaactatgaaggtgtaccctcacatacatatactattttggaagggattcgctgcaagataggcgatgtaccttttgagaaaggatgtgagttactggataatcggatttttgaatcttattttaatgagatctccaacaatgggcgtcccggtctgacggctacctactggaataatatgaatttgagtggtgatgtcgcggctacaagtcagattacttctccgattaatctgagtaatggtgggaatacagtctttgccacaggtgtgggcttatataattttactgctgtttatgaaggaacttttcgtccgaaagagagtggagcttatgagttgctgattgaaggagatgatggctatcgggtatatgtgaacggggaaaaggtgattgattattggggagaacatgccagtgctaaaagggaatatacgttgaaagcaattgcggggacagattataagatcagaatagaatatatgcaggcaggtgcggaagcgttgcttaggtttgatttgggtgtttatcgtcatatttcacctgagatggttgtcgatagagtcaaagaagcggatattgttattttcgcaggtggcatttcgccgagtttggaaggcgaagaaatgtactccgttaacagtcccggttttgctggcggcgaccgtacttcaattgaactaccgcaagtgcagcgtgatatcctgaaagcattgaagaaagcgggtaagaaggtggtttttgtaaactgctctggttcggcggtcgcattggttcctgagatggagtcttgtgatgctatcttgcaggcatggtatcccgggcaggctggcggactggctgtggcggacgttctgttcggagattttaatccgagtggaaagctgcccgttactttttataaaaatacggaccagttgccggattttgaagattacagtatgaagaaccgtacctatagatatatgacggaagttcctttgtttccttttggatacggattgagttatactactttcgatatttccaaaggacgtttgaataagaaaactatatctgccggacaggatttgaattttaaagtcaatgtgaagaatacagggaagtatgatggagctgaagttattcaggtgtatgtccgcaaagtagatgatgcggaagggccgataaagagtttgcgcgctttccgtcgggtaccgctgaaggcgggagagacttgtgttgtatctattgatcttttgccaactacatttgagttctttgatccgactacaaatactatgcgtattatgcccggaaaatatgaaatcatgtatggcaatagttcggatataccttcggggaataaattgagtgtaacacttcggtaataatattactcattaatgggggtgtcaaaagtcagtagcaatagcttgtgtattcacctaccacctccccctgcgggtactcctccttcccgaaggaggagatttaagatactgccgacttttttgtcagccccagtttcgttactattgacttttgacactctcatttatttttcgggaaattcagtctgggattttaaggacagctgagtgatccttatccttttttatcgttcctatttcatatactgatgtaatggtgcaggaaggggctgtgttgtaatgctattacagactcaggctttctcacagcggatcagtactttttgcccgttgtttaaggtgctggcaaacagataagtgtctccaccttccgacaatttgattcgtttacggagttcggcaaccgtagccggaaagttacgtactgtgatatttgcttttttcaagtctccgagactttcttttagttcttttttattaaggctgcattgactaatgatgtggaaagccctgccgggaaagctctcgaccaacacatcagaagtataaagatgactgttaggatgcagttttttaacaggaaatgcggaggcgatgctgcggaaagctccggctttcaggagtgaagcgttcggctcatagagataattttccagtgcgttggtatagttgcattcgctgcactgctcctgttcgcgggtgaatacgaaatgctgttcttcctgtatccccttggtagggagatttacgcaatggatggatatttcttctaccgatgcttgtccgagtatcagtagtaattctttgcattcattattggcagatatgatgtgaactttctgtacgtgttgtaactctttcaatgccaatgacaagtccagcatgggcgagagtttgaccatgacctgtcccgctttgttcagtaagagttcttccagttcggctacatcgggttcacagtctgagatggcaacagtctttcctccgtgctcgttgcggcgggcaggatcgaggaagatgcagtctaccggagacatagcttgcagataactcactccgtcctcgttctttacgttgatatggtttaggttcaggatgggaaagttgtgtgctgctatctcgcagagttcctgctggcgttctacgtaaatggcggatttgaatttggcagcaaggaaagcgcagtctattccgaatcctccggtcaggtccgtcagggagttaccttttaaaagggttgctttgtagcgggcggtgacttctgacgagcattgctccagtgataggtgcttcgggtaccatatatcatccatgtcgctccatgatggaatcttttcggcggcaacctgccttcctgctatctgtgtgatggcggtcggcatatctacattcgggtattttcgggcttgcagggccagagcacgtacatcatccgtctgatgttcgcggataaagagctgggtttcgggggagatttgcatcataggttgtttatattcggcgttatatggtggacttgtttatggtattacgttgtatttcttccgggcttcttctcggctgcagaagttgaaatgccaccattcgctgggcaatgcacggaatccggcggctttcattactttcctcaataatatccggttctgacgttctgttttggtgatttttccgttgcgtatcagttcgccttcttcggtgatgtgcgcttctactccaagatgatcgacctttgtgcccataggcaacggtcgccccagcgagtcctgaatgctgatgtctaccgccaggccgtaattatgaagtccgcctccacggttggggttggagacatatctgtatttggaagttcctttgaccacatcccacatttttctctgtacggacatcggacgtgcagcgtcgtaaataatgagactgtaagatggatgcagtgccttcagtgcttcttgtgcttttaagagggcatacgccgcatgaggatgcagataggcttcggacaggttgtcataaagaatttctccggtgaagttatccgcttttgtgtacattaggctgatggcgatgctgttgtccagctccgctatatttattagtcccagagaatccatgtaaagagccatcgggcttttctgatgttttggaaccagtgtgctggcggattcatttttctgcgagggggatgtataaatagaatctgcatcaatggagtccgcatgagcaaaggatatacagtcggatgctgtaccttcggggcttatatctccgggtcctgcgcatatagagtctgtgcacgttgtttcgacctttgcagatgtcttcgtctccttatgccccggtacacaggaataccctgccagcagaaagcaaaagacagataaactatatttcagcatcatcattactcctttgggttttgtgtgccaaagatacttctttttgaatttagcaccaataaaaagccttttttacgctgtttgttggatctatatatcctgcgcgttggacatatatgccctgcgtgttggatatatatcccctgtacgttggacatatatatcctgcatgttaggttactataccctgcatgaacggtaactataccctatatgcaaatatagtctgaataccggcacaccttcttctgtgatttatccggattttcagcggttgatactgactattactttttttagattggccgtattcttccatatttcgagtagttgcagaatacgttcatccgttactctgctgttattgacagacagcagttccgaatatatttccagcagcttcttcagttccttgacaggctgttccggaagttcggcaatcagtgatgtaagtagcagctccagttcccggttgtgtagtgggctgacgtttatcatttgctgttgtatcaagtcggtaagtcttttcagaggtccccatccggtacgttggtgcgaacccagtatcctgccgatacgtgcactgtctatacatcctgtgttgacacggtccgtccatattccggcggcataagaacgggaagtcttgtcggctaccagcatacaactcgcttccagcagataagaggtctcatgccattcgtgccttaattggtgaagtgcctctatagtggcttgggtgataccaacttctctcacttcatttagcatcggatcataaatggcacagcggatgcaccatacaaacaatggttccggtgtattgggagctagccatacaaggcggggcagatcgttttgtatatcgtcataacgttctatctgtgaatacatttccaccagtagcggatgcggatcatacgagtgataactcactctctcatcatactttcctttattgacgatgtggatgttctccccttccggaacattgaaactaagggttgaagatgtccagttgaccactttgttgtgataatcagtatatgaatgaggcgtttggaaagtccaccatgagaagtttcccgtcagaaattcgcgtgagcttttgctataagagaaatctttgaattcagtataaaccgtctccggtgatttgatcaatcctgctgtcatccaccatgaagggtgggcgaagggagcttgtggaactgcatcttttgctcccatcaagaaggaaaacaaattttggtattccccttccaattcctgaaggacagtcggaaggtcttgcgagggataatcattcaatgccatcctcgacagggctatctgcatatccatatcgtccggctcggcattggcctgctgatattgtccgagtctttttatcagaactatggggtcaataaatgcaggcgtatgcgtaggagtggatagcatgggaagtcggttctcgttgctttccaaaaggtctaatgtccggcacagtaattgtttgtgaataggaaattccattcttttattactcttctggcggatggttattttctgcagattgcgatatctccactgacctttctgaagttcgtctttctgcaccattttctcgtgcagggtgctcagttcttttgcttctatggggaaacgcttgattaatagttttgcatagtcgataaggaacgttgccatcatagaatccgatattccgttgcgtgaacttccgccattgataagtaacttataagcacgttgaagaacaggtgtccattgggtgatatgtttcgcttccagttgctcattccattctaccaacgcattcaggaaaaggtcgaagtggtatagctcattggaatctagtatttggctggccagaaatgtcaggtcttcgatggaagtaatttcctgtatccggttgtcttcccgaaggatgggtggcatcggttcatagtcgaaggaggcgacatttgcctgctcgtcaagagtagtcagcaagactttatcggtagataaagcatctgaaacattgtctttcagataagctgccaattcttttttagtgctggtcagcattgtttctgcataagcagagagtgcttctttcaatgtgggcgactctgtttctccaaatgtttgaatcagtttcactatcttgttctgagtagattcgtcgcgactcatcaacccttgtgtggcagcgcaacagatggcatcatgatattcttttttctctttcgccagtttgctgagaactcccagcgtgttttgatggacagcttttacgtccgaagcgaagaggagagcggtctgatccagaaaatcatttgtcaggaaccgtggatggctgcacagattcttcagaagaccgagaatgatattgatcggtcggctatggggagaagatagtgcggcaaacatctccggctgcaatgtcagttgttcttcaacgctgggattgagtgccgtaaacataccggcaaaccagctgcacaggttcttgttaaagttccggttgattgccagcaaagactctttcagtacacgcatacggtctaactttccgttctcggtgaagtgctggaatgtataataaggatatcctttggccggattggcgtgccagttttgcccgcagtcgtattcaaacaaataccagatgtgctcgttgattgtaatatcccgcttttctaatacgggggtagtgtggatatagttaaccagataacctgctatcgtctgcggagagggggaaacggtgagaattcccctttctatccagtccatcaatatctcatagtccatattgtagaagcctccgaactccttaccttcaccttcaacgaaataactgtccagccacgtgggaatatgccatgcggctatctcgttcagatgcgctgtgtttatcccccattcgtgtttgcgaaattccttgaggggaaatatcacaagggcggcaagatcaataatgtgatgctgtcccgacgtggcacgcgtaccgtatgtcctttcttccagctggacaaacttattatagtattcttccaaccggctgaggcaagggatgaggctctcccgctcctcctgtgtcagtttctgcagaaaaggaatgatcttctgcccttgctctttttctactatctcggtaagctgtgtttctagtgcagtcatggttataattttgattgaaggatatatgataacaatatccgtgtttataaattagtctactttaaatcaattaagatcacctgaaatgataaaaacctgataccaagcaatattacctattacttattacctgatacctatcacttatcacctgcctaatgctgtaactacttttttcagattagcattctttttccacatttccaggcgctagcggactttgtcgtcggttacgcaatgaccgtccatgcgaagcacttccgcgtagagttcgagtaactgtttttgtccggtgaccggattgtcgggcaatccgccgatcaatacagtgagtaactcttccagttgttgattgtgaaaggcgcttcgtttgtatatgctttcatacacttctgtggtgaagcgttttagcggaacaatgcccatattgataattcgtgctactatttctcctagccggtgattgtctattctgttgttagcgatgccttccacccatagctccgcagcgtatgaacggacggttttgtcaacaaaaagcaggcctccgcccagcaacagtaaactcatctcccgaagcggacagtgaaaagacaataacatacgtaaagcattggctacactgcgtttgctctcttcctgcggtgaaccgaaatccatgtagcagttaatgatttgtgcaaccagtggttccggttggttggggaagaagctgaacagacgttccatatagtcggaatcgcctatattgtatctgctgttgatgaccagatgttcttgccaaagctggtggctgttgtgttctgcatactcatgccacttgtagaaatcgagctggagcagacgtgtatctgctgcatattgattttctttctgtgccggttctttccagccataatttcctgtcaggtagttgtggggcagcgtgttgcaggagaagtttttgaatgcttcaaattctgtatccggctctttcaccagtccggctgcaagccaggcagatggatgattgtacggtggttcgggctgcgtctctttatctaataaaaagagacaaagatgcagatattcattatttaataattgtcgggcgacagcaatggcttcttccttgtcttctaaagcgcagcgtgctatggccagctgaaagtcccatgaacaaggctttgcattcgcttcctgataaacggcgagccgtcgtacaagttcggtggcctggatgtatgccgggctatgtgtcggagtagagagtaaaggtaatgagtcgccttttttgattttacggattacttccagccacaattgtttgataggttcaaaacaggttctattgctgtaagttggctgccagtctgcaagacgcttgaaagcacgttcgtcgtaggctcctctgtttgcgtctattcctttgagtctttcttccaggcgtgcgaagagcttacttaggaatccttggttggcagtgtctttttgtgtccataaacgttgatattccagcaggaaagtggcaagaaagttctcgtatactgcccaactgttgataatgatgttggctgcccgttggaatacaggctccatccggctgaaatcttcttcatccaactggggatggaaggcgatgagggcggtaatcgttgtgtctgtttcccaactttcatccatgtcgaacaggcggctgagctggaacagaaaatcttctttattggcaggaaacgggatacggttgtcttcccgacaaatacgaaccttttcttggaaggttgtttcgggaaggccggtttcttccgcaggctgcttcatgaaagaaacaagtatatcctgtacgctctggaacatctcggattggtaagatagcaatgtctcttgcaatgtagaagaggatgcgtctccgtactttgatataaagctggcagctttcttttgcaggctttcatctttcttcaggaatagttggcagagtgggatgcaacacgcttctttcatttcggggtgcccggcaacgatctgctcaaaaatggaataaatagtaagcagtgagtttttggggctggaaaagaaaagagtagtcgcacgctcgataaactcctgatagtggaacccgccttcggaggcaatcttttttagttgttgtaacatcacattcaccggtttggtgtatggagaggtgaacacttgcatgatttcctcttgcagggatatgagttcttccgcccttggctgcaattcttcaaagagtccggcaaaccaatttaccatgtcttttttaaaacttcggttgaaggtggaaagtgttgctcgcagaagctggtttctgtccagatgtccgtcgagcgagaaacgatagaaagcggcgctaaagctttcatcccgtgaggtggtcccttctttataggctgtttgggcacggtcattatgataaccaatggatgattcctgttcgaaaagataccaaatgtgttcttttagggtgatttctctttttaacagtaaatcgctgttaaaagtgtctttccctttaggaatggaagatctgatacagatataactgggcaatatttgtgcgatacgttttggagagagttcctgcatatagcccatatctatcagctgcatgagctgttcgtaggatatattgaaattcaagtaactttccgcatcatttatatactctgccagccaactgggagtataaagagaaagcaatttgcaaagtaagttgaagtctatgtggtatcctaggtccatttctcgtttgttgccacatacgaactgtacggcacccagaaagcgtgcccggtgatgatcgcaaaaagtttcactaaatttgccttttatccattgcagttcccggatggtgggcaggagttttctccgttctttcactgaaagttctaacaaccttttgataaaaggtatcaatatcttttcttctttctccggagtatccacataagttttggataatttctccaactcgcgtttcagttcttccattgtacaagtttctttactgccaaaatatgtttgcaggctccccgttctccctgattgccgctaaaccaggtacaggtgcagcgttctttctcaccttccctgtccagaataaccgtatgtcttactcctccgctcccagcgacacgtgcttcggtccgatttccgtcatttgatataatttccactttctcttcttccaatagcttctcggcagctatcatacgcggattgaggctcaggatacgctctgtcttaaagggcaggcgacgataaaagaaactattatcatccagatcgaagcccagtaaccccatagctgccagtcgtgcagacagagaatccaccttatcgagatcaatgtgctcctcaatagcgaaaagagtggggttgaactgctggttggcgtaactgtatttatccatcgcttctatccatttctccggaacgtcttcaagcagggcgtccaatgccgcaccttctccggagaatccgcgccagcattcccgcgacagggaaaggctgaaacgaaccggaccgaaatagagttgccagatggtcgattgcatcgtcggatgaacaaagactctcagctcgtcggcaaacggcaacaggggttcgagcaggcgcagacgatgtacccctccgatacaaacggcattcagacttttcaccggtgaaaaggccggtttttgtccgcgcatcaccaaataatagtcacatttcacggttcctttggggagtgtctgaaagagttgcaaagtctgtatgcgattgaacgaatacatccgttcggcaacagactggtaaatctgtaccgtggtcagcccctttatccattttacgggcagcggtactttgcgttctattactttttcacctttattgtaaagccctacctccttaggtccgactgacatcactactttttcttgtttgctgatgcttcccagtgcagaaatcataccggcattgaagtcaacattcgttgttccgttctccaggaactctccgtcgtgtccgtcgggcagtacatcgactctggcatatacgcctgcacaattcgaaaatccttcgaagcgtaaacgttcatttcctgccgtcacaatcgggtctttcagcatggaaagctgggcaggagtcagattaaaactagattgtactacgttggataacgcaatgaggcagcgtgccgtcatataaggttgtgtcagcttcccccaaaagaaacagggagcttctttcttttctatttcactgtattttgccagaaataattcgtcctgatcagacgaacgttgtaagacagacggagctgcgtattgatatgaaatagtatcggtcatagataaatatataagtgcttgttggacatttcccaaatatagaaattaaatctcagaatggaaagttgttgagtagtttactctgtttgtgatgctgggattgtgattttataaagtgaaatattttaggttgtttgcttcgcttttgcgttttgaatgcgaaagtcagtgtttgcttttatggattgttttttgtttcagtataaatgattgtttgctgtatattgctgataaataaagaattattcgattattaaaaattattcttaatagttttagatagatctttatatctaaataaattattttttataactacaattatatagcttttttatatgtaatggagaaataatatttttgcggtaaaatattactttcacattagagagaactaataagtgttatgaaatatagattaagaaaaggaagctgtttgtgaaaatcgctccaatattgtttgttttgtttgtgttatcccattttggtgccaagagtggttttcaaaatgggatttttttttgggctgactaaaaagtcggtagtatcttaaatctcctccttcgggaaggaggagtacccgcagggggaggtggtaggtgaatacgcaattctttcattcatagtaaaatagatacaaccttgttttgcctaccacttcggctttcagccacccctccttcccgaagggaggggaattggagatactattgcttttttagccccccaaaaattgatgatactattgactttttagtcagtccctatctagggtttctttaatgatgcccgttttatttacctcttccgtatctttaaaatcataattttgtgggaactagtatattctcatatactttggcatggaataaattctctgaaaggaagcgaaaattagaggaagcaatagattcggttccgatgccggatataaaaaaaggttgtaacaacttgtgttacaaccttttttgtggaccagcctgggcttgaaccagggacctccagattatgagtctgttgctctaaccaactgagctacaagtccggtgtatccgtttactggatgcggtgacaaaagtagtattttctattgaaatatgcaagtcctaacaataaaaaactacaatactttctcttctcagaacttatatttgcgtttcgggttcttggggaaccagcctttttttacccggtcttcctgctcaaagacctctttgatggtccagaacgaggagaaggcaaatacccctaacagagaagacagaatgacattgtcgacgctcaacgatgccgcaacgcctgcaatgcctagtatcaggaatatccaccagcatttggtgccccaataatattcggcctttaccacaacagggtgaaaaaggccgataatcaaaaaggtacaaattccgataaataacccggcaaggtgatattcattcaggaattccattctgttatttttctacgcggataggaatttcttttttgatactctgttccagagaaatcagtgtttctgtagcaaccacacccggtatttcttgcattttgttattcagcaagtccatcaggtgttcgttgtcgcatgcgtagagtttggtcagcatggtgtaaggaccggtagtgaaatggcattccacaatttccggaatcttttgtaactcggccaccactgatttgtacatagaacctttttccagtttgattcccacgtatgtacaagttctgtaacccagtgatttcgggtttacatgatagcctgagcctacgatgacgcccaagtcgatcagtctttgtacgcgttgatggatagctgcacgtgacactccgcattcggctgctacgtctttgaaagggatgcgggcattctgtgaaataatctctagaatctgcctgtcgaggttgtctattttttccataataataaattataatttcctgttgttatcaaatagtaagcaaatatagagatttattttaattattcttcttttacgggaaaaaaaataggaaaaagcaaaaaaaaggagtgcaaagactttgcacccctttcctttttctatttagaaagatactttcttatttcttatctttttcgatacctaccagttcaacttcgaaaatcagagtagagaacggtttgatctgtcctgattctcttgaaccgtaagcgagttcttgcgggatgtaaagttcccatttagaacctacaggcatcatagtcagagcttctgtccagcctttgattacttggttggcacggaaagtagcaggctcgttacgtttgtaagagctgtcgaattctgtaccgtcgatcaaagtacctttatagttcactttcactttgcaagtgtcggcagggatttcacctttaccttcagtgattactttgtactgcaatccgctttcagtagttttcacaccttctttagttttgttttcagcaaggaatttttcaccggcagctttattgtcagcgtatttttcttccatagctttcgctttgatagtttccatagctgtgcgagtatattcctgagcagcttccatagtcatcacgccacctttttccagtgtacctgcgatgaaaccagccatgaagttgtctttgctgatcgttttggtagagtcaccagcgaacagttcttggttgatacccttcatcatctggttgctgatctgctgaccgatctgaagacctgccatataagcgatgtctttcttgctagtcttgtttgcaccttcgttcaaacctttgatgaattctgccatgtaagcagtatcaacgtccagacggcctgtcagatagcctttcagaccttgagtctgagccataccgatagagtaagacagtgagtcgatgtctgttttcagatttgctttaggagcttgagctgtacaagaagcaagacttgcagcagcggcgattgccataaaaatactaacttttttcattttgctttgaaattttttatttataatacttcgagtaattctacttcaaataccaatgtgctgtgaggaggaatcatttctccggcacctctggcgccataagcaaggtcggacggaatatagagtttccatttggaaccttcgggcatcagttgcaatgcttccacccatcccgggattacctgattgacgccgaatacagccggttctccgcgcttgatagagctgtcgaacagtgtaccatcgatcagtgtgccttcgtagtggcattttacctgatcggtagctttcgcttttttgcctgtgccttcgttgatcacttcgtattgcagtccgctgggcagcgtaaccacgcccggctttttcttattttcttcgagaaaagcttttccttgttcgatggcggcagcgcccatcttagcttccagttcttcgaaatacttgttcactatttcgcgggcttcctgatggctgatagccgtctgattgccttccaatacatctttaattgcttgtgcaaagtcatctacagcgatgccttttgcacccatgcttaataagttttgaccgattccgaggccaatagcgtaactgaatttatccatataatgtttttgttgaagatcgaagcatatcaccttcatggttttagctttcaatcaattgcaaatttatgaatcgcaaaagtacacgttttatttgaatgatttagcatttagtatttaaaaattcttatatccgtgaaagttagcctcttttctttaaggaattaattccttcattcctaagatttaatctttgtgttcttactgtttaagttcgtttatgctggaatttattcgtctgacagctgttgaacttgcgtctgacaactgttgatttttcgtctgacaactgtcagacgaaagaaacacatctgtcagacgaatagtttttcgcatgaccggcagtaagtcttcgtatgggcagcattaaattcttgtataccttggattagattatgggggcggaagtcttcttttattcaatgattctgattacatttgtatatctttaaataataaggaggagcggttatgaagaatctggtagtattgacaggtgcgggcatgagtgccgagagtggaatcagtacatttcgcgatgcgggcggtttgtgggataaatatcctgtggagcaggtagctactcccgaaggataccagcgtgatccggcattggtgattaacttctataatgaacgaaggaaacaattgctggaagtgaagccgaatcgcggacatgaactgctggcggagctggaaaagaatttcaatgtgacggttatcacccagaatgtagataatctgcacgaacgggcaggaagcagccatatcattcacctgcatggtgagttgacaaaggtctgctccagcagagacccgtataaccctcattatataaaggaactgaagccggaagagtatgaagtaaaaatgggagataaggccggtgacggaactcagttgcgtccttttattgtctggttcggagaggcggtgccggagattgagacagctatccgatatgtagagaaggcggatatattcgttatcatcggcacatcgctcaatgtatatcctgcggcaggtttgttgcattatgtaccgagaggagcagaggtgtatctgatagatccgaagccggtggatacacatacttcccgttcgatacatgtccttcggaaaggggcttctgaaggggtggaggaactgaaacaactgcttattccagctccgtagcaaagatatgactattccggagtgtttccgaaatctcgagtgcggtgatattgctgcactcgattcttaataccttctcccagtcctcgaaatctacattccatcgggtgatttgcgggaactttgccaggagacttccgatgagcttgatgtcgcgtctcttcgtgatggaggtccgaaaaattagaatctgattttccatgtctttttaggtgtttattcctgtgaacgaaattcacggatagtgatattgaaatgttgtttaaagttgcggctgaggagtgataaactgctgaaaccacaacgaccggcaatttcggtcgcagacagttgcctgtcattctgtagtagcagtgctgctttttcaatccgggtgcgtttgatgtattccgtcggtgtttcgcccgtcagaaacgtgaaaacgcgatgaaagtggaaaggagaaaagcacgcgattcctgccatcttatgcaatgatagaggttggtctatgttttgatgaatatattcggtcactttgtcgatccgtaatttatattcctgcctatttatttctttcgtttccattttaatgcaaaataaagaataataagagccggagagttgtcctatcttgccaacttctccggcagataatgattatcttttttgtcctatatagaatacgtagccatagtaatctttatatttactatacagacttcgttcgtactgctgacctttcatgaaatccatcgcagttttatttcccgcgtgttctttcatgaatgtctcccgtacttcatcttgtggggcaaaataatgttctgtccagcagttctccggtaggatgaaatgggctgttggagtatatccggccctttccatcttgtcaatacatgtcgggatcacgctgatttccggataggcgtccatccagaagtcttctatttccgcagggcgttccgaagtgaaccaggatgcttcgctcactgcgatgaaaccgccttttttcaggtatttgttccattcgttcatcccacgttcgaatcctatattgtagattgctccttccgaccagatcaggtcgagttcctcgttctgaaacgggagattgtccattgatccggtgattccttttactctgtcggcgcaattggctttcaccgcattctcattgaatatttcgataaaatcgggaaagaggtctatgcccgtaatctgtcctttcacgtagtcagccagaaacagtgtctgaccgcctgtgccgcagccgatatcggcaatctttgcatcatcggtcagttcgttgatgaaacttacagctttgcgtgtggcttccggacttccgggaccttgacgtttcagcagcttgaagtagttacatatgaaagagaaatcgaaatcatgtatagatgtattattgttactcattgtttttaatgttttaggtgtacgtcaaatggaggcatacggggatgcataaaaccatttgagcctacaatagttgttatttttttagaaaatagaaatcaactctgacatgaatatgccggagaaaatgtaagggataatctgtaatgagaggaagacttacagattatttacagaacgagatccttgcggaatgtaaatgtgattaacatccaattattctttttagtttgtggcaaagatatggttttaacctaaaaacaccattgatttttccttgaaaaaatactgtgggactgtattttagcaagaatcgtcaaatgaataaactgcatttcggctggaagggtataaattaaagagattcttaaccaataattatgttttttttgtatttttgctacccgcaatataattatgtgtaaaatgtggcgaagaacaataacctttctcttaagtcttttatctatggtgatggcggaagccactaatcattattttaagcatttgggagtatctgatggattatctcaggtgtgtatcccatcaatttatcaggatgagttaggggcagtctggctgggaactactgagggactgaatagatacaacggtaaggatgtaagagtattccagccttcggaaagtaatcatggactgactaataatgagattaacgaattatgtggagataagaacggaagaatgtatattcgttcgggaaacgatctgattaaactggatatttatacggagcaattcacttgtctgcgacagaaaggtgtgtatggactgttttgtaagaaagatacactttgggtgagttgtgcagacggcatttattattatacgggacagggtacagagctgacgttttttgctcgtgtgcagaaaggttttgtgggaagagcactctatgtagacagagagactgtatgggtggttaccagaaaatacttggtcgcaatatcacgtgaagaccctcttcggcaagagattttacttacccttgataagggtaattgtattttgggtgatagttccggaaatatatgggtgggagcctggaacggattataccgtgtttctcccgatcgggagacaaccgcttatgttagtcattcgggaatgggggaattatccgataatcaggtccgatgcgtgctggaagatgattttaagcatatttgggtaggtacgttcaagggaatcgattgttacgatccgattactgatacgtggagtcattatacgcgttatggaagttcttcgaattctttaagccatacttctattctctctcttcataaagatatgcaaggtaatatttgggtcgggacttattatggaggagtgaatgtattcaatcccgataagaataatcatagcttttattgtgccgaacctttacgtgaagactgtctcagctttccggtagtcggtaaaatgactgaagatagtgcaggaaatgtgtggatctgtactgaaggtggagggctgaattgttatcatggggatactggcgttttctcccgatatatgtatcaaaaaggagatcagagtacattagggagtaataatgtcaagtcggttttttatagaaaggagaacaatcgattgtatgcggggactcatttaggaggattgttcgttctggatttaaaatcgaacaagggacacactctccatcatgttaccggtgaccctgcctcgttgcctcatgagattgtgaacgatattcaggagtataaggatggcattgcgatgttgacacaaggtggtccggtgttttttgatccggtgaccgagaaattctcaccgcttacggatgatccgtctgtccagaaattgatcagtcgggaatatgcttttgaaacgtttctgatcgatagccggcatcgtatgtggtttgctgttggtggcggagggatagtgtgcgtcaatttatcttcttcaaaagtgactcaatatttggcggatagcgagaaagacacgttgacggtaggaagatacaaaaccgtgcatatttttgaagataataaaggagatatttattttagtacaattggcgcggggatattcaagtatcaggagaaacaggatactttcaagtcttacggaactaccaatggagtacttccgagtaattattgttattatatctgcgagtctgcccgggataattgtctgcttgttttgcatgggaaagggctttctatctttgatcgtgaaaaagaggttacagaagagacttatcacttgtttcgtcagacttataatttggggtccgctttatatcgaagcaaaaatgggattatttatataagtggtaccaatggattggctatgtttcaagagcggtccttttatgaatctcaggtcaaaagcttcttgaattttgataaattgtttattttcaatgaagaaatagctcctggtgatgagtccggcatcctgactgagatattggcgaaaacatcggatatctttttaagctatcagcagaataacgtaacagtggaatttgctacttttaattataatagtgaccgtaatcgtttgtttgaatattatctggatggcttcgataaagtgtggacccagacttccggcactacggttacttacaccaatctgcctcccggagattatacgctcaaagttcgttcgatggaaaataaggagagtttgaaagatgcaatctgcttgaatatacatgtttccgctcctttttatgctaccatatgggcatatctgttttatgtcctttgtctgactgcattgatggtcgcatttgttcgttttaaaacacggcaggcggctctgaggtcttcattggagtttgagcgaaaagaaaaagagaggattgaagaactcaatcaagtaaaattgcgcttctttactaatatttctcatgaatttcgtactccattaacgcttattctggggcaaattgaagtattgatgcaaatggatttgggcacaaccgtttataatcgtattcagcgtatatataaaaacgcctggcatatgcggaatttgatctccgagttgctcgattttcgcaaacaggagcagggttatttgaaactcagagttgaagaacagaatttggttacttttactcgtcagatttatatgtgtttttatgaatatgcacaaaaaaaggagatcacatatcgctttgattctgtagaagaaacgatttctgtctggtttgatccaatacagttacagaaagtgatttttaatttattgtcgaatgcttttaagtatacatccaataagggaaatataactgtagaagtaaggaaagttgcttcacaggccgtagtttcagtgtgtgatacgggtattgggattccggttgaacatatttcgaagatattcgaccggttctatcagacggacaatgcctcttcttcctcttcttttactttggggacaggcatcggattggcgttggcaaaaggaattatgaatatgcatcatggaaagattgaggtagaaagtactgttggtgagggtactaagtttatcttgtctctgcctttaggaaaccgacatttcagtgatgaagagatggctgtgacggaaggtcgggagtcactgattattccagaagcttctgtatcttcttatggacagttgatggcggaagagataaaagaacctgaatcgcagaaaaatatggatgaagaagataagcctacgattcttttggtagatgataataccgaactattgtccatgctggaagatatattcttaccgatgtataatgtatatactgcgtgtaatggacgcgaaggactggagatggcgcaacaaatacaaccggatctgatagtaagtgatgtgattatgcctgagatgtcaggtaaggacttgtgctataaaatcaagaccaatgtagaactttctcatatttctgtcgttctgttgacagcacagacttctgtggaatatgttgtagaaggtttgatgttcggagcggatgattatataacgaagccgtttaatataaaggtattggtggcccgttgcaataacttgataaaaaacaagaaacgtctgattgcacattatgcgggtaaggtcattacggaatctcctgtagcggaagctattaatgagaaagataaagaactgctgacgaaatgtgtaaatattgtcagagagaattttgagaaccctgattttgatgttactgcgcttgcttcagaattatgtatgggacgtagcaaattatatatgcagtttaaacaaatgaccgggttgactccgaatgagttcatcttgaaagtgaagctggatgaagctatgtctttgctgacagagcatccggaactaaatataacagagatttccgttcggctcggcttttcttctccccgttatttcagcaaatcctttaaagccttcttcgggattgctccgcaaggagtcaggagtaggaaggagtagttgtttcattacctgacttctcaagtattaatatccggcatatcagctattaatatccgacaattcagttgttaatacctgatatatcagctgttaatacctgacaaaccaggtattaatccccccaatgtctgcctataggttactatacgttggataacatcatttgtgtagaaaaagaagggcgatgtatccaaatcttccattataggtgaccaaatcttccatgtggatgcagaaatgttctttttgcaaaatttgtgtttatggatgtcatataggtctcctatttttgcaatgctttcattctgttttaatacatagaatcaaagacaataaaataagtatgaaaaacacaataatttatcgcatgaaaagcagattaataacattactcttattattgattactgtcagttctgtaacgtttgctcaagaagcaaagaaggaaattcctttgaaatatggagctacgaatgaaggtaaacggcaagaccctgccatgcagaagttccgtgacaaccgtctgggtgctttcatccactggggactgtatgctatccccgggggagaatggaacggaaaagtatatggcggagctgccgaatggctgaaaagctgggcaaaagtacctgctgatgaatggctgaaactgatggaccaatggaaccctacgaaactcgatgcaaagaaatgggcaaagatggccaaagaaatgggtactaagtatgtcaagattacaacgaaacatcatgaaggtttctgtctgtggcctagtaagtatactaaatatactgtagcaaataccccgtataagcgtgatatattaggcgagttggtgaaagcctataatgacgaaggaattgatgtacacttctatttctcagtgatggactggagtaatccggattatcgttatgatataaaatcaaaagaagatagtatcgccttcagccgtttccttgaatttaccgacaatcaactgaaagaactggcaacacgttacccgaccgttaaagatttctggtttgatggtacgtgggatgccagcattaaaaagaatggttggtggacagctcatgcagagcaaatgttgaaggaactcgttccgggtgttgccatcaatagccgcttgcgtgctgatgacaaaggaaagcgtcattttgatagcaatggtcgtctgatgggtgactacgaatccggttacgaacgccgcttgcccgatccggtgaaagatctcaaagttacacagtgggactgggaagcctgcatgactatacccgaaaatcaatggggatatcacaaagactggtcattgagctatgtgaaaactccgattgaagtcattgaccgcattgtacacgctgtttcgatgggtggaaacatggttgtcaacttcgggcctcaggcagatggtgatttccgtcccgaagagaaagcaatggctacagcgattggtaagtggatgaatcgttacggaaaagctgtttatgcttgcgattatgccggatttgaaaaacaagactggggatattatacacgtggtaaaaacgatgaagtttatatggtagtattcaatcagccttatagtgaacggttgattgtaaagactccgaaaggcattacagtagaaaaagccactttgctgactaccggtgaagatatcactgttgttgagacaacccgcaatgaatataacgtatctgttcctaaaaagaatccgggtgaaccttatgtaattcagcttaaagttcgtgcagctaaaggaacaaaaagtatttatcgagatgctttaacataaatgataaagaaacgattctatgaagtttaaatatatactcattttatcagcgcttatcgggcagattctttcactctctgcccgggaagtgacctctttcaatgaaggatggctattcaaacgcgggcctttttcacaggacccggtgaaggtcgctgctcaatggaatgcggactgggaaactgtaaacttgcctcatacctggaacgctaaagatatgcaggtaaaagctgatgctttctatgaaggagttggttattacaggaaaacacaattctttggcaatgagttgaaagggaagcgtgtatttcttcgctttgaaggtgtgggcgccaacacagaagtgtatgtcaacggtaaacttgtcggaatgcaccggggagcatacagcgcctttgcttttgaaattggaaccgcattgaaactgggagctgagaatgagataatggtaaaggcggataatgcttcacgtcctgatgtgattccggtaaatcacaatctttttggggtttacggaggtatctatcgtccggtatggctgattattactgaacagaataacattacagttaccgattgtgcctctccgggtgtatatattactcaaaggaatgtatcgaaacgctctgccgatatcacagtgaaagtgaagctggacaatggaagtcttactcctgctgacttggtactcgaaaataccatttatacgcagaatggcaagaaggtcacttcccatcgccttcctttggtactcactccgcagggaacacagacttacatttctaccttcaaactgaataaaccgcatctgtggcagggacgtaaggacccttatttatataaggttatttcccgcttactggcggacggaaaagtaattgatgaggtggtacagccattgggtgttcgtagatatgagattgtgccaggcaaaggtttctacttgaatggtgagaaatacccgatgtatggggtaacccgtcatcaggattggtggggattgggtagtgcgcttaccaacaaagaacatgatttcgacttggctcagattatggatatcggagcaactactgtccgtttcgcccactatcaacagtcggattacctgtattcccgttgcgattctttgggattggtcatctgggcagagattccttttgtgaatcgggtgacaggatatgaagccgaaaatgcacagtctcagcttcgtgaactgattcgtcaaagtttcaatcacccttccatttatgtatggggattgcacaatgaagtataccagccccacgaatatacggcaggactgacacaaactctgcataatctggccaagacagaggatcctgaccgctacactgtatctgtaaatggttatggccatgcagagcatccggtcaatcaaaatgcggatattcagggaatgaaccgctacttcggatggtatgagaaaaagttgcaggatatcgagccttggataaaagggctggaggagaaatacccgtggcagaaactgatgttgacggaatatggtgctgatgcaaatctggaccatcagacagaatatctgggtgatgctctgaactggggaaagtctttctatccggaaacttttcagaccaagacacatgaataccaatggagtgtcattgcaaagcatccctatatcatcgcttcttatctttggaatatgtttgactttggtgtaccgatgtggagccgtggcggtgtacctgcccgtaacttgaaggggttgatcacttttgaccggaaaatcaaaaaagactcctattactggtataaagctaactggagcaaagatcccgtactctacctgacccagcgtcgcaacatcgaccgcgaacgaaaacatacttccgtcactgtttattctaacataggtacaccgcaagtgtatcttaatggaaaagaactgacgggtatacgccaaggctacacggatgtgcactatgtcttggatgatgtaaccttggaacaaggtaagaatacaattaaaaccgttgcaacatataatggaaaagaatacactgacgagattgaatggaactataccggcgaaaagaagcgaagtgccgattggagtgaaaacaaagaagagcacgcaggttggtaatcggagacgtttctgtatgtaatctgaaaaatgttgaatctaaaatataaaagcctatgaatgaaatgagaaagaatctcttttaaatggaaaacaagtatttatcattaactaatctaataatttatgaaaattgaaaagttttatttgtttctgctagcttgctttgtcgcgataggagcatattcgcaagatgggcaacagaaaatgactggtgatgaaaagagtcagcagcaaagtgatgcaaaagttaagattaccgggcaggtctttgatgagagcggtgaaggaatacctggagcgaatgttactcttaaaagtaatcccaccagtggaactgtcacagatctggatggtaagtttattttgatggcttctcctcaaaaggatgtgctggtagtcagctttattggatataacacacaagaatttccactgaaagggaaaacaaacgttaccatccaactctcacaaaacgtaaatgaactggatgcggtggaaattgtggcattcggaacacaaaagaaggagagtgtgattggttctatcactacactttcgccaaagagcctgagagtgccgagcagtaatatgacaactgcattggcaggtcaggtagccggtattatttcttatcagacatcaggagagccgggtgcggacgatgctagcttttttgtacgtggtatcgcatctttcggatttaacaccagtcctttgattctgattgataacattgaatctacaagtacggacttagggcgtttgaatcccgatgatatcgaaagtttttcaatcatgaaagatgccatggcaacggccctttacggttcgagaggagctaatggcgtcgttctagtaaagacaaaagagggagagagaggaaaaactaagtttgatgtaagaatagagggaagtaattctcgtccgaccagtaatattgagttggcagaccctgtcacttacatgaaattgcataatgaagccatcttaacacgtgatccttccgcccctgtcatgtatagtgatgataaaatagacagaaccgttccgggatctggttctatcatttatcctacaaatgactggagaaggcaactaatgaagaactcgacctggaatggaagagccaacatgagcatcagtggcggaggaaattcggctacgtattacgtgtctctgcgatataccaaagaccagggtttgctcaacgtagacggcaagaacaacttcaacaacaatatcaatcttcagacttatcagatgagggctaatgtcaacatcaatgtgacaaaaacgacccaggtaagagtaaacttaagtggaatctttgacacttatgaaggccctatttattcaggatcagaagtttacggaatggtcatgaagtccaatcctgtactttttcccgctgtatatcctaccgatgaacaacataaatatatcaaacacattctttttggaaacagcgatgacggaagttatctcaacccctatgctgaactggtaaaaggatataaggaatatgagaatacgactcttcttgctacattaggtattacacaggacttaaactttatcaccaaaggtttgaaatttgaaggtttcttcaacgtttctcgtaagtcacattataaacagactagacaatataagccctattactatgctttaagttcttatgatttcatgacagagaaatattctatcgaaaatatcaatcctgactccggaacggaataccttgattttagtcccggtgacaagactgttaacaatgtaatgactatcgagacgagaaccagttataatcagactttcggtgatcattccgtaggtggtcttatcgttactcagtatatcgacagtaagaatccaaactacaaaactttgcaggagagcttgccttcaagaaatatgggtgtgtcgggacgttttacttatgcctatagtgaccgctatttcacggagttcaattttggaaacaatgcttccgaacgctttgataagaaacacagatggggattctttccgtccgtcggtggtggctggatgatttcgaacgaaccattcttccaaccgctcagttcaaaaattacgaaattgaaactaagagcctcatacggtttggtgggaaatgataagattggcagagtcgatgaacgtttcttatatctgtctaatgtgaatatgaatgcaggtggagcatctttcgggtatgaaaacaaatatagcagaccgggcgtaaatgtttcgcgttatgctaaccctgccattggatgggaaaaatcccgtaaagctaatttcgcattggaagcttctttctacggatttgacctgatagctgaatatttcacagaacatcgtactgacatattacagaaaagagccagtattccaagcgtaatgggatatcaggcagacgtatatgctaacattggcgagaccaaaggacatggtgtggatcttgatttaaagtatcaaaagaaccttaacaaaaacgcttttttgatagtacgcggaaacttaacctatgcgcatagtgaatatctgaaatatgaagataacacgtatgataaggaatggtggaaatacaaaataggctactcgcccaaccagaagtggggatacattgcggaagggctatttatagacgatgcggaagtggccaactctcctgtacagtttggtgattataaagccggagatatcaaataccgggatatgaatggagatggagtaattaattcattggatcaagttcctattggacatccgactagtccggaaatcaactatggctttggatcaacatttagctataaaggttttgacatcaatttccagttccacggctcggcgcagtcttctttctggattgattatgataagatgtctccattctttaaagatccggatatgaagcagaaaactaataatcaactagtgaaatttattgcaaatagctattggtcggaaagtaaccgcaatcgttatgcaacatggcccagattgtcaaccacttctgttgccaacaataaagaactgagtacatggttcatgagagacggttccttcttacgactgaaattggttgaactgggatatacagtacctcaaaaaattgtgagcaaatggggtatgtccaatctgaggctctatatgtcttctaccaatctttttgttttgagtaagttcaaggattgggatgtggaattggcaggtaatggtcttaattatccgttacaacgtgtattcaatattggtgtaaatgtaagtttctaaaaagaatggttatgaaaaaaatcaaaatatgtatattgtcatgtttgtcggtgtttatattgacatcatgtgaactgaatatcgtcccggataacataccgaccattgaagaccatgctttcgccttgagaaaagaagcggaaaaagtcttgtttacttgctacaggtatatgcctagtgacggaagtctcaaaaataatgtagctttgcttggtgccggtgatttttgtatttccgatgttttccggagctatttgggaaccagcgcctggtatatagcccaaggattgcaaaagtccgattcaccatattgtgctcaatggggacatttatatgagggaattgcttattgtaatattctgattgagaatatacatactacaccggatatggatgatagcgagaaaaacagatggatcggtgaagtggaatttttgaaagcttattatcatttctatctgatcaggatgtatggaccgattcctattatggatcgatatgttccggtaagtagtagtacggaggaaatgcatccttatcgggagacattggacagttgtttcaattatgtgacagaaactttggacaaggtgattgctaatccggatgttccggctaaaatagagaatgaagctgaagaactgggacgagtgaccgtaggtatggctaaagcattgaaagcgaaagttctggtaaccgctgcaagtccattgttcaatggaaatatggattatgaggtaattgcagataatagaggtgtgaaaatctttaatccggttaaaacggaagaggagaagaagcagaaatgggtaaaggctgccgaagcgtgtaaagaagccattacttatctcgaagatttgggattcggtttatattattttgatgatcccactgtggtcatgacagagtccgacaagctgatgatgaatttgcgaggtgctgtcactgagaagtggaacaaagaagtggtatgggcaaactctcagtcatgggtcggttcgggttcttatgacaactatcagatacaggcaatgccgcgtgacttggttcccggcagaaatgctaagaatgctacgaacagaaccaatctgggtgtttctcttggactgactaattcattttatactaaacatggggttcctatagaagaagataagacatgggattatgctaatagatttgaagtgcaggctcccacgccggtggaagctgagcccggatatgagaatactattatgctgaattataaaacgggaacagtcaaattgaatctggaacgtgaacacagatattatgccagcttaggctttgacggcggtatttggttcggacaaggaaagacgggactttcgggcttgtattcagtgaatgcgcgtaaaggaggaaatgtgtctcccattccggcagatcactctcagaacctgactggtatttggcctaagaaagtggttaactacaagacggtcatgtccgatgcggcttccggatttacatcggtcacttatccgttccctgttatccgtatggctgatttgtatttgatgtatgccgaagctttaaatgaaaaaggagaggattatgctacggtattgccatggatcgatatggtgagagaacgttcgggacttcaaggcgtaaaagaaagttgggaccaatatgtaggaaacagcaagtatgctactcagactggtctacgacaaatcatcatgcaggagcgtcgtattgagttagcatttgaaggacattatttttgggatgtccgtcggtggaaaactgcgacaacagaattgacacagccattgaccggttggaaagtccgttatggagaaactgatgtagattattatagtgagaacttagtgcttgtccgggatttcactcccaaaatgtatttctggcctattgatatcggtgagttgagaaaagatcctaacttagttcaaaattatggttggtaagtaattaaagtgacatttgatttatgaaaaagataatatacagtagccttttagtgctagccatcacattgctgcctagtgcttgcgataacgatagtgatatgaattctccccatggaagtacgactccgcctgaacaggtagtattgaatggtgtcaaaaatctgccgggaaagtctataatctattttacacagcccagtgataagaattttctttatatgaaggctgtatatatgacagagataggagaacgttcgaccaatgcttcgtattttgccgactctgtagtggtggaaggatttgaaaaagctggtgaatataatgtgaagttgtattctgtaagtccgggtgaagcctattctgaacctctggaagtaaaaataaatccggaagagccaccttatatcactgcttataaggagatggaaataaaaccggattttgccggtatccggataaagacatccaacaccagcaatgagactcttactttttatgtgtaccggaaggatgctacaggaaaatggacggaagctggagctttatataccaaaaagcaagagattaatgagcccatacgtggtatggaagccgttccttcagaatttagtgtggtggtgaaggataggtggggacatctttctgaaagtaaggagatatctctgactccatattatgaagaggaagtagataagaaaaaaatgggatacttggctattggcgaatacaaaggttatctggcaccgaatgctaataccccaaagaatctgtatgacggaattattggaagcaataatactttcatgaccctcacaacggcgggatatgattttaccaagccgagttcggtgacattggacttagggaagaagtttaagctcagccgtatgattgtctatggaagaaggaatggaactgattattcatctatatttgacggtctgtatccgaaagaaatagaaatttggggacgaaatgataataatgtaaccaagtttgatccggaaaatgatgaaggatgggtacggttatatcaaggagtattgcccagagccgacggttctgttattccggcggctattgtcccgttaactgatgctgataaggaactggcaagagacggcaatgaactcgaattttccgtagatctggatgcatatagatatgtgacgtttgtttgtatcaagaattataatgtaggaacatctcgtatcaatgtggcagaacttactttctttggaacaccggaggataaaataatacagtaattgctatataaaagacaaatattatgaagaaatttatatttatatcagtcagcatcttgatattttgttccattatatcttgcgagtcaatggatgcgacttataaggactttgttaaggatggtccaatcatgtatcttacacgattatcgaaagattcaataaccgtgcgtaatgggtgggaaagagtgttgatttcatttccgatagtgaaagacgggagatctacaaagattgctcttgcattgaatcaaagtgatactgtcagatatgacttggccaaaaataagaggacggatattcttttagagaatatgcgggaggggtctatcattttttccgcctggctggaagatgatgagttgaataaatcattggctacagactttacaggaaccatttatgggacacagtaccagagctatctgttaaatcgttccattgtttctaagagtatgcagagtggtaatctggtcatcaaatattccatgttgctggacagcacattagtggcatccaggctaacttggaacaagggaggagaagaaacaacaaaaatttcttattataataaggaaggacaggacgttttagaagattttacaggcgattcttttataatggaaaccttgtatgctccacaggaaaacgtattggataaaatctggtcgaaacctgttaaatatacgaagtagcctgagtggtcggcctgattgtattttaaggatgagaaggtgtgtcaaaagtaactaaactctcctccttcaagaagggaatttagttacttttgacatacccccttattctccaaatgataaacatgcatatatgaaaatgatacattataaaatcataattctattattgctggcatggagtccttgggatttggttttaccttgtccctctatttgtacgtctgccttgcagaatgatgattttgatattctaatgaagaagattcgggatggggttacagaaaatccgaatattgataaagctctggaactgtatgatgacgtccaaggatgttttatagatatagattatgcccgccgggatcgtactaactggatgccacttattcatgtggatcggttgtatgactttgtatttgcttatactcatccaaagaattcctattatcagaatgaagatttgtatcataagatagtaaagggcttggagtattggcatcatcgtaatccacattgtaataactggtggtataatcagattgccgagccgcagaaactcggtattctgcttattcagatgcgtgttggtaaaaggcagattccggaaatattggagacaaaggtcttgcaacgtatgcggaaggacggcggacatcctgccagatggactggagccaaccggacggatattgctttacattggatttatagagcttgccttcagaagaatgatgttgacttgaaaacggctgttgagaatgtttatagtcctctatcatatactgtgaaagaaggatttcagcatgacaacagctattttcagcatggcgtgcagctttatatcggtggttatggagacgaaatactgaaaggagtaacacaggtagctctatatactaaaggaacgaaatatgcattggatgatgagagaatacaatttctgaggcattttatgtgcggcacttattatcaggttatacgtggacaatacatgcttttcgatgtattgggaagaggagtgagccgtaataatgctacccaaaagagtcatgccgccttgtttgccaaacgaatgctggagctcgacccggcacatattgatgaatacaatgcgattatagccagattggaaggcaagaagtccgccaactatggaataaagccgttacacactcattatttcagaggagactatgctcttcatgtccgtccccactatacatttgacgttcgtatggtttccaatcgtaccatgcgatgcgaatatgggaatggtgaaaatctgaaaacctattttatgtccgacggatgtacaaacatcgtgaccgaaggggacgagtacgcccgcatctttccggtatggaactggaatcgtattcctggagtgactgctcctcaactggataccattccacgaactgtaattgattggcaaacgaagggaacttccgtatttgcaggaggagtctctgatagtctttatggcgtatctgtttattcatattttgatacctatgctgatataaataccgcagctaaaaagtcctggttctttttcgatgatgaaatcatttgtttgggagcgggggttaattcgacagccggtgtaccggtatgtactactatcaatcaatgtttgctttcgaaaaaagaggtcatattgtcgcaaagtaagaagcattcagtagtgaaagaaggagatttcgtctatgattctcccgaatgggtattgcacaatggaattggttatgtctttcccgccggcggaaatctctttttgagcaagaagatgcagacgggatcgtggtacagcattaatcatactgaatctaaaaatgagcagcagcaagaggtctttactttgggatttaatcatggttgtaatccccggaatgctacctatgcctatatcgtggtgcctgggattcattctgcccgcaagatgaatcactacaggaagagtcccgtcgaaattctggcgaatacggattctatgcagatagtgaggcatacgaaattgggaatatggcaaatggtattttataaagagggtacattccgtagcggagagctttctgtaagtgtggataaagcctgtgcattgatgattaaggatggacactgtggtaatgccgaactgcatattgctgaccctgggcagacacaatcctgtattaaagttgaattgctgattcctgaaatatccagcgagcgaaagactgttttatgtgattttagaaataccggtatctatgccggtgcatccaaagcatataaattaaaaaatatattatgaagaaattacttttgattctttttctaagcatagcttatttatgcacgacacatgcacaatcgtttactaaactcgaagtgaagcaatcgatgcgtagggtagccgattggcagatcggtcattacaacagagctgtttatggtgatctcaactgggtgaatgccacctttttcctgggacttgcttattgggcagagatcgccgagaaggacgatcaggatgacttctattataaatggctgacccgcttgggaagtcgtaactattggcaggtagataaacggatgtatcatgcagatgatatttgtattgctcaaacctatctgtatctgtacgaaaagtacaagcaaaaggacatgattgttcctactctggcgcgtacggagtgggtggtcgccaatcctccttcgggttcgtttcagttgacttacggagatgccacgacattagaacactggacttggtgtgatgctcttttcatggcaccccccgtttatctgaaactctataatatcactggtgataagaaattcattcgctttatggataaagagtacaaagcgacttacgagttcctgttcgataaagaagaaaatctcttctaccgtgaccaccgttattttgatatgaaagagagtaatggtgccaaagtcttttggggacggggcaatggctgggtgcttggcggactggtagaaatgctacgtgaactgcctgccaagagcaaatatcgtccgttctatcaggaactgtttcagaaactctgttaccgcatcgctaatttacaaagttacgacgggttctggcgtgcaagtctgctcgatccggacgcttatccatcacccgaaacaagctgtagcggtttcttcgtatatgcccttgcctatggactgaacgagggacttttaccaaaggaaaagttcctgcctgtagtagagaaaggatggaaagcactgctttctgcggtagaagaagacggtaaactaggatatgtacaacctatcggtgccgacccaaagaaagtgacccgcaatatgacagaagtatacggaccgggtgctttcctgcttgccggaacggaaatgtatcgtatggcagaagacgctccgaaacagaatgctactatcccgcagaaccgtattcaggaaattgcagctatgcttcccgatcgaccgcaggggataggaacgtcttataaggacaggactttctggaataagataaaagagagtgacgacgctaaacaacttctggaaaaggaagctcctgctttgttaaagcaggggatgcccccttttgtcgattcactgtacctgcatttgaataagacgaacgttcgtttgcccggagagaatatgatgaatgcccgttatcaatatctgtacaggctgactttggctgaatgccttgaaaataagaggcgttatgtccctgccatcgaaaaagctctggtggctctttgcagtcagaagccttggtctattcctgcccacgaccgcggtctgaagaattataaaggaacggattattatgtagacttggtggttgctactgccggaaacggtattgctcagtgtgttaccatgctggacgatcgtctgtcgccggaggtaagggcacgggtgcagtgtgctttccgtgagaaggttttccgtccggtctaccgttgtctggaagagacaaaaccattttggtggttcaccgctaccaataactggaactctgtgtgtctggcgggtgttaccggtgcggctcttgccttgttgcccgataaggaggaacgtgcttactttgttgcggcagccgaaaagtataacgtgtatggaatgaaggggtacgctgacgacggctactgtagtgaaggtgtaggttattataattatggtttccgtgcctacattctgttgcgtgaagaagtataccgggcaacgcagggaaagatcgacttctttcagactcccaagtttgtccgtatcgcccggtatgggaagaagatacagatgaatgaaggagtgtgccccgcctattcggattgtcgcatcgggttgtcgccggacaagtttattctcagttactgcgaccgggcgctgggtattacttctgcagaagaacagcctgttttacccaaaggaaacaacttgtcccttcaccttctcgaacttttcacaagccgggttgcaaaggttggaatgacagacggaatccgtcaggtattgcaggaagagtcggatgctttgcgcgcttattatgagcaggcaggtattttgattgctcgtcctgccggtggaacttcctgtcgtctggccatatcagccaagggcggaaccaatgcggagaatcataaccacaatgatgtcggttcttatgccgtagctttgggaagtgaaacgatggttggcgatcagggtggtccgaactcctatcccggtgattactttaacggagacgctcctcagaaatataagataaaaggatcattcggtcatccggttcctgtagtagacggacgaacacagtcctcgggtggcaaagcgaaaggcgttgtgctacagaaagaatttacgaacgaaaaagatgtattcagtattgactatacctctgcctattccacccccaatttggataagctcattcgtactttcgtttacgaccgccagggtgaaggcaactttacagttggcgatgaatttacagcgaaaacaccgatccgattcgaaacagccataacgacacgagccgactggaaaatcctggacgatacacatcttctgctggctactgattccgaacagatgattgtagctattgaggcatccggtaaagtggcgtttacttccgaaacgattgaagtgaactctccggcatatacacgtatcgggattgcattgaaaaatcagtcgaaggaaggatatatccgattgaagatgtacacaaaataagtctgtgtattagatatatgaagtatttatagggcatatatgcccagcgtgcaggacatatatgtccaacgtgcaggagatagttaccctgcacattggctatatatgtcctgcaatcagattatagttgccctgcaaacgggggaagaaggtactatctttatcttcttgtttttattcttgctactttcgcttaaactgtctatttttgaggctgcatttccatacttgaatacgagtacctcattattaatagaataaaacaatgaaaaacaggtttctgatcatatgcacagttttgtttctctcctcttgtttggcgtatggacaagagcaagcatctgtaacaaatgacttttctgaaaataaacaaggttgtattcagcatccctggcaaggcaagaaagtaggatacatcggagattccatcacagacccgaattgctacggtgataatataaagaagtactgggactttctgaaagaatggctggggatcactccttttgtttacggcattagtggaaggcagtgggatgatgtaccccgtcaggcggaaaagctgaagaaagaacatggcggagaagtcgatgctatcctggtttttatggggacaaacgattataatagtagtgtgcctatcggtgagtggtttacggaacaagaagagcaagtgctgtctgctcacggtgagatgaagaagatggtgacgcggaaaaagcgtacgcctgtcatgactcaagacacttatagaggtcgtattaatataggaatcactcaactgaagaaacttttcccggataagcagatcgttctgctgactcctttgcatcgttcgttggctaacttcggcgataagaatgtccagccggatgaaagctatcagaatggttgcggagaatatatagatgcttatgtgcaggctattaaggaggcaggaaatatatggggaatacctgtcatagactttaatgcagtgacaggtatgaatccgatggttgaagagcagcttatttatttctatgatgccggctatgaccgtttgcatcccgacaccaaagggcaggagcgtatggcacgcactttgatgtatcagttacttgcgttaccggcaactttttaaatattcggtaggtgacattccgtactcgtctttaaagcattggcgatagtaagaaacattgttgaaacctgtcatgtaggcggcttccgagatattgtatgttcctgttagcagcaattgcaaactgttcttgagtcttactttacggataaattcattggcggatatcccggtcaatgctttcactttccggtagaaggtggaatggctcattcctattttgcttgtcatgaaaggaatatcaagttctgcatccagattttcttcgatgatgtgagttagtttttcaagaaactctctgtcgagtttgttgagttctataggttccataggctcctgtaaggctttgggctctagctcctgtgtatgggctgttatttgctgtgccagtttcttgcgggattccagtagattatggatacggctgttaagtaatttggcactgaacggttttgtcagataagaatcggctccactatcgtaaccttcttctttgtcctgaatggaatctttggctgtcagcaggattacagggatatgactggtgcgcatatcttcctttatggagcgacagagctcaataccatccatgacaggcatcatgatgtcactgataataatattgggaatatatttctgtgccagttcccatccttccttaccattgatggcggttatgacttgataattagcgtgaaaggaagaagcgatgtattcacggatatcatcgttatcctctactgcgagtatgatagggcgggtatctgtttcttctttgctatcctccgtgtctacatcattttctgtcatattgagtggctcttctccctcttctttgtgtaaggcatcaggatatgtgttctcagtcaggatgcggaaagtaaaagacgttccttttccggtttcgctttttacgtttaaaataccttgatggagctctgccagtgattttaccagtgcgagtccgataccggttccggatgcttgatgcttgcctttggcttgatagtagcgatcgaatatatgtggaagggcttcggagtctattccatatccggtgtcgctgacttctatttctgtgtataaattattctcctcggtgatagtgcgaagtgcaagtctgatatcaccttctggtgtatattttatagcattggatagcagattattaacgatactcgtaatcatgtctgtatcaaaatagagttgggtcttctctgtttcaatatcaatgtggaatgttacttttttgttttgattcagttccttatagcgtaatccaatttcagtgatcagattggcaagattacttttgctgactgttaattgtcggttttgagtttcggttttacgaaactcaagtaactcgttaatcaggtttaacaggcgaatagcactgctatggatgatgctgatcttttgattataacgtggagacagatcggggtcgttcagcaaatcttccaaagggcccagaatcagtgtcaatggagtccgtagttcatgagtgacattggtatagaatcgtagccgttcattgtttagttcttgtttgttctggctgtttttcctttccagttcaagagagctttccaggtttaacttgcgtttataggtgcggagagataaatatatggcgatgcatataataatgaaataaaacagtttggcataccatgtaagccaaaagggagggtggatatgtactgtcatggaggcgatatgcccttcatcccaatcctgatttttcagtttcgcttttactttgaaagtatattctccgggagcaatattacggaatgtaacctgattctctccttgggtgttggcccatacattttctaatccttctatcatataggcatattctaccagctggctttgagagtagtcggggactgtgaatgagattcggaaagaattctgattataaggcaaatcaatgtttccgttagttgtaggaattaaaactccggcgttgtggctttctatctgtctgttgaatcctttacattcggtaatttgtacgggagctacctgatgttcggttatcagttctttaggatcaaagtaacagactccgtttaatgagccaaaataaagtattccgtcttcggtggagcaggctgatccttctataaagttacctgccggtatgccatcgtgatgattatagttttcgaataattgttttttcgaattccagcgagaaatgccgtcattggtacttatccagatattgcctgctttatcttcctgaatggcgcggacaaaattatcatccagaccatgcatggagttatatgcctcaaagtgttccggttgcatcgtgttcttaatatgcgcaatcccgttacgtgttgcaacccacacttctccttgggagttgaggtagagttggttgattgcgttggagcagaagccattatctgtattgagtcgcattgttaacttattgtctttgtcaaagatggaaatgcctcctccgtatgttccgatccataatttcccttggcgatcacgaaggatgccatatacggaacgggcataaagttgattggtgatttcttctgcgacacgagctgtaccgttttcataaatatatacgccatattcagcacctatcagcatggtaccatcggagtcttcaaagaaggtgatgatatcaatgttgtccatacctaatggaatgcgttcaattcggttcgtttttgtattcagcttcaacaggccgtcatcataaatccccagtaagaatgtttgtttctgatcacttctgagggaaaatacttgcccgtaaggtctgctgaggaacggagtaatatttagagttttcgtgagctgatagtctttgaatattgcgacttcattttcgctcccgacccatacttgtccttctttgtccgtgctgattccccataccggtttgttttttagcgtttttcctttttctgtagtataaggaagcgtatggaatacaggcttcgtgtgactgatgaagtttatgccgctgctatagttaccaatccagatattaccaaaagagtcttgcagcaggcttcttatattgctggatgaaagtccgctttcatcattggatgcggagatattggtgaatttcacactcttcggattcatgaaggtgatgttgtgcaaatcgagtatgctgattcctcctatatctgcccctatccatagtgttccgtcgttcatctccttgatgcaataaatatggtctgctatcagagaatgcggattaccgaactcatgtttgaaagtgagaaattcctctgtttgagaattgaataaggcaagtccctgattggttccaatccatatatttccggaatgatcaatatagatacagtatacactgttgcccggcagacttttgggattgtgcggatcattgcgatagttcttgcaggttttactctttaaatcaataatacttagtcctccttgggcgtgtcctatgtacaggcttccatgaccattatcgaaggagcaccagcttgaatcgtataaatccttaatatttttgtgggagaagggtgagaattgcttcgtctgtttattgtaatatatagttccgccatagtggttggtgatccatatccccttattatcggccgaatgtgccagcgcaacaatattgctggctatgctgtctgctatattattggtgaattgataagtagaacagtcaagtttgctcagtccgtccttgagtccgatccatagagcattctcttcttcgtcatatagcagggcatttaatgcgttgctgatgatcccggaatcattatccttgtaagtagtaaagttccgtccgtcaaaccgactcagtccggattctgttgcaatccagatatatccttgtttatcttgtgtgatattggtcacataattgttggataggccgtcttctactccaagatgtttaaggagataaggctgtgcatagctgtcataataacccagcagtaggtaagctatgagtataaagtacattctttgcatatacgttatcatataaggtgatctttaagacaaaaatacaataaaaaaatggtaaaaaccagatggagatatgttgtatgcaatgatgaacaggaaaccgtactgctatccctttattaggctatcccattgacaataagctaattaatgtaatgtatcgtgaatcgttcatgccgatttcccctggtctattgcctaatttacctcctatttttgcccgatttacctcttataattctagtggaatacctctaattttgtctcgttctctttgaggggagacatcaggatagtgtcacctgcttccagggcttcaggagaaatagttgatcttatatattaattttattttattattacatgaaaaacaatttgttacattggagtctctgctccttgcttttcttcacttcatgtgcggacgactacaagtttgtcaatgaagggatacctccaaaagcttttgatccgaatcagcctgtagtcgtatctctgatcgaacctgattccggtgtttacaacactcagtttgttatctccggaaaaaactttggaacggacctgtcccgcataaaagtatatttcggagagaaagacactgcgagactaatcagctctaacggagattgtatttacggtatgactcctaaacaaaatgacggacagaacaaggtgtctgtagtgatcggctcggagtacaaaggcgaactgccctctctgttcaagtataccaggatggagcagattacgaccataaccggaaccggtaataccggcgaaaatgcagacggtacattggctgaggctaaattcagagtaatacgcggaatgtgtatgatagctgacgataatatacttgtaagcaccgatcagaccaatgtgcggctggtttctgagaaagagaaccgagttacgaccatttgttcgggaataaaattcggcggtttgggtgctaccaaaaatcgtgaaacagcttatggcatccagtatgacggaacacacgctgtttacgctttcaatcgggcaaaaggatggcagatgtcgaagatactgaatactctgggtacggaggtaacgggaagagtggctgactgtgttttaagcgatgacgatcagttcctttatttttgtgataccagcggtaaattcggcagagtcaatttggaaagccttgaagtggaaatactcaatgctgaattaggaaacctggggggacttaccagttggtgttttatagcgagggataaagtaaatgactgcttctatgtatctgccaatctaagtaataaaatcctgaagatttcttccgatggcaagtcttttgaggattatattggtaacggaacaaacggatttatggacgggaacagagaagatgccatgatgagtacagttacaggtcttgcagtagatgattcgggcgtattgtactttctcgatacaggaaacggtttattaaggaaattggaggatggcatcgtatcaactgtcgcagggcgtaagggaaatctggctgttgttgacggaaaacccttggaatcatcgttaaaatggccttatgatctcggctttgactcaaacggatctctgtattttgttgaatgtaacgcaggtatggtccggaaatttaccattcagtaaatctaataccagatagatatgaaattgacaataaatgtaatcatgatgttgctgctctttgtgtgttctgccaccatatcagcacaaaccaatgaaaaaggttatatggtcgccggaacggtgatggacgaaaagggggaaacgattatcggtgcctcgatcactgtagacaaagaccgttcgaaaggaactgcaacagatctggacggtaagtttcgtctgcaaggtctttttaaaggtgaagtactgactgttacttttataggctataagccttatagctataaagtgacgatgagtaaggagaatattaagattgtgctggaaccacaggtcagcgatttggatgaggttgtcattgtgggcgagggaagccagaagaagatttcccttacgggtgcggttaccactatcgagcctgcggcattagatgtgccggctacttctgtatccaatatgctgggtggtaacgttcccggcatcatcgctgtgacccgaagcggagaaccgggtagtgacttttccgaattctgggtacgcggtattggtacatttggtgccaattcctccgcattgattttgatagacggtgtagaaggtgatatgaatcaacttgacccggcggatattgaaagcttttcggtactgaaagatgcttcggcaacagccatttacggagcacgcggagccaatggcgtagtagtggtgaagaccaagcagggaaaagcggggaaactccgtattaactataaatcaagtatcacattgagcgaatctgcacgtatgcctgagtattgcgatgcctatacgtatgcgttactggctaatgaagcaaaactgagcaggggagatgatccgctttacagtgctcttcagttaagactgtttcagacagggcttgatccggaccttgctccgaataccaactggcgtgatgtgattctgagagaccgtgtatggcagaatcagcattatttcagtgtttccggtggcggtacgaacgcacggtattttatgtcgctcagtatgcagaataaggatgccgttttccgtcccgacaagtctgccaacaaatatgatcccaacatcaattatcagaagtactcttttctgaccaaagttgatgccaatttaacaaagaaaacaagattggggctgaagctttaccaagtaatgactaaccagaactcaccgggattgggaaataacagtgcgttatggaatgcgcaggcagcattgacacctgtatcgctgccggtgaaatattccacaggtcagctggcgtcgaaaggagccaatgcggagtctggctatgagctgttgtctccttatgtacagttgaactatacaggtttcacagagacccgtaatctgactaccaacttgatggtggatttgagtcaggatttggattttattacgaaaggactgaaggttagaggcttattctccttcaccaccaactctgaattttatactacacgttctaaaatgccggatctgtattgggcgaacggaagaaatgcccaaggcacactggtcatgacgaaacaggtggaaaagaaggacctgtcattatcaaggtctacggataccgaccgtacctattattggcagttgaatgcggattatgaccgtacgtttggtgatcatgccataagcggactgctccacttttacctgcagagcagaacgaaatcaaaagactcggacgaagacaagaacgtcagcaccgttctgaaacctatccccagacgttatgaggcgctttcgggacgtgtaacttacaactacaaacagatttactttgccgaattcaatatcggatatacaggctccgaacaattcccgaaaaataaacgcttcggatttttcccggcagtatccggaggatggattccctctcaatatgattgtttgcaagaggcacttcctttccttgattatctgaagatacgtgcttcttatggacttgtcggtaacgaccgtatcggtggtacacgtttcccatatctgacaacagtcaccagcacaggtgatggcggctggggaacaggcggtattcgggaaggacagttaggtactgacggacttgtctgggaaaaggcgaagaagtttgatgtcggtgtggatatcaacctgttcaataataaattctcgctgactgttgactactttaaagatcgccgtactgacattttccagcagcgtgtcactgtaccggaagaagccggtttcatctctatgccgtgggccaatacaggttcgatggaaagctggggtatggatggaaacttcagtttcaaacaggattttggaaaaaactggcgggctaccatacgtggtaactttactttctcgcgcaacaaggtattgcattacgaggagtctgatatacactatccttatcaatcgagaatcggatatccgagcggagtacagaggggatatatagccgaaggcttgttcagagactgggaagatatagagtccagtcctaagcaaaactttgagagtaaagtatatccgggcgatatcaagtatgtggatgtaaatgctgatggtgtgattgatgtggacgatagagtacctttgtctttctctaatgtaccggagattcaatacggttttgccggagaagtgagctggaaaaacctgactctcggaatgctgttcgaaggaacaggacatagtacttactttttgggaggtacaggctattaccctttcagtggcggttcgacaggaaacctgctgacaatcgtggcagatcagaataaccgctggactccgcgtgaaatatcgggtacggcagccacagagaatccgaatgctcgtttcccgcgtatgacttatggcagtaataagaacaataatcaggcatcaacatattggttggcagacaacagctatttgcgtttcaaagaactgaatatacgctatacctatcgcaacccctggctgcagaatgtactgggtgtcagttcaatgagcctgtcgttcattatgcataatatttgtacatgggacagcatcaagctgtgggacccgggacaggcatctgcgaacggtgctgcttatcctattcagcgcacttattcaatgcaattgagtttgaacttttaaaattgaacgaattatgaaattaaggaatataatgatggcgggtgtttttatggcgtctgcgatttcaaccactttcacatcttgtgagtctttcctggatattgatgaatatgtatatgatatgacgagccttgactctatttttacgagaaagagtcagcttgagaagtatatcagtgctgcagccaataacttccctgcttttgacaacgtatggaaatcgactccattgcctttgggattcgcatccgatgaagcgttcgcatctatcaaggaaagtgaaaaggattcatggaaaggtctcttttttgcgatggggcagatggtagacaaatatagcaacgactttttccgttggggagaactctatgtatctatccgaatggcgaatattgtgattgcccggatcggagagtgtacggatattacagattttgaaagacgtgacttcctgggccgtgcttactttatccgtgcttatagctattacactttgatgatgcagtatggtcctgtgcctatcgttcccgatcaggcttttcctaccaatgcgagtgtagatcagatgtcttatccgagagctacttacaccgaatgtgtggaaaagatatgcagtgatttcgagcaggcagcttctttgctgaaggcagcggacgaacgcgatgcgtcaacctatcgcatccctacgtccggagctgcattagctctgatgtcacgtgtacggcttgaagcggcaagcccctggttcaatggaaataaatactattatgacttcctgagaagctcggacaatcagccctatttccctcagaattatgactcgcataagtgggctgtcgcagcagttgccgccaaaagagtgattgatttgaatttgtacaacctttacacagttcgcagtacggcatacacacctgaattgccggccaatacttatgacctcaaattcaataacaaaaacaataaattcccggaaggccctcatggtatagatccgcttaaatcttacagggatatgttcacgggagaagaagagggattcagcatctccgaatttatctggaccaagagtcagacggaaaacaataccagacttgttttcccttatgcgatggacggtacgaatgctatcagcgtgaatggagagttggcggatgcataccgcatgatagacggacgggatatcaatgcttccagcgctgaatatccttatccaacggaagaaaaggcatggcaacccatcagtaatctggatgatgcacagaaaaccttgctgggaacctccttctcaggattcgacctggatcctgaaatggcacagatggattacaaccgtgagatgcgttattatgctacgataggattcaaccatagaatatggccggcttcttcttacaatggtcctgacccggcgaataaaaaagcgttgaaagtgacttattatagcgatggaacgggcaaacccgatcaataccaaaaagagacggtctgtgtcaccggctatacttgcgtgaagtatgtcaatgaaatggattcccccgcaggaagcgggaaagtattatctaaaagttttccgcttatccgctatgctgaaatcctgctgaattatgtagaagcgatgaatgagatgggagatggtgataactacactgacgaaacgaccggaatatctgtgtcacgcaataaggaagaaatgcgtaaatatttcaatatgatacgttatcgttccggtcagccgggtatcaccgacgaagaactggataatcctgaaaagatgagagaggccatcaagcgcgaaagacgaatagaactggcatttgaaggacggcgcgcatacgacctccgccgttggggagatttggtaaaagcgacaagcaggccctttaccggtatgaatataaaggcgatgaagaaagatcgtaagaactactatatgcgtacgattgtcactgagtcggattgtaagttctccaagttcaatataacccaacggatgaatttctatcctattcgtcaaggtattatcgacaagaatccgcggatagaccagaatcagggttattaaatgaaaacagagaagtgattcaagaaaagataattcaaatagaataaaagatatgaaacaatataataatgactttattcgactgatgctgggtggacttttgtgtttgttcgtgtcggcttgcgtgagcgaccctttggctgacgagcaatatactaaaaagttgactttagtaggtgcacaagatgagttgcaggagaaagaggtaaaatatggaagcgacggagagttcttcgttaccgtctattgtggcggaacaaagatgcacgaagatgacgtgacagtgactttgggagaagcagatcaaagtaacatcgataattacaactataaaaacgtgttggaaggcgaaatcgaatatgtggcgctgcctaaagactggtatacgattccttcctacacaagcgtcattaaggccggcgaacgttatgtgcggttccccgtacgtgtagataccgaaaaaatagatacagatgcacggtatttgattcctttgaagatcgtagactcaagcccttatcctgtgaatgaacaggctgacacagtgttgctggtgaaggtgaaaatgatcaatgactattcgggcaattatatgatgaagggcaccgagtatccgatgaaaaatggagctccggatttgttaagcgggactccgatagaaatagcccggactctgacagcagtggatgaaaacacggttcgtttcttccataagtcggtcaacgaggaaatgcccaatctggatgataacggtattactctgacggtggataagagcaccggaaaagtaagtgtcagcccctggaagaatctgccggttgtagagaatagcggaagtggtacctatcaagtcgtatcgggaaactatggaatcaatacacggagatatgtgatagagtataattatatcaatagtagcaataaggaaatgtatgtttctgtgacattggagacttctgaaaattaaaaggcttcattgtccgaacggtctgtttccaggaacaacccattcagtaagctccatggcgtacatataggtatgtatgccatgagcaatggggcgttcccggaaatcaggcattatacgattggttcggatgactatattaagatcaattttccgcaggacttgacaaaggcctttttttgttgtatatttgcaggtgtcatacaggcaataaagtaacaacccattaaaaaatgaaacgaaatgcaccttatcaatcatcttaaccgaaccgaaagaatagtgtaacattataacaaaatacacaggggatcatatgcgaatcagcatctatgtgaaccggtgataagcttgaggctgcaaccttttatagagtttgcagccttttttgttgcataaaattaaagaatatgtgcttaaaaggtgtatttgagtttataataaatggggagaccgtttataataaacgatgaaactatttattataaactcaactgcgattttagtattaagggtaaaaagttttctatatgtcagaagagaccaaagagagttttcttttatttgacttggcagacagcgaattattgtaacacaataatcttttaccttattgcccgatttaccccctatatctgcccgatttacctcctgtctcattgtgctcttctccctatttttgtgcattaaatattcttattcttttcaatgatgaagtatgctgcatgatatgcgcggcggaggtgaaaagtgcgtggctgctttgcgggatgttgttttgaagaagaatagtacaatattccatgcttgttgtattattctccataggaatatagatagttaaacgtaaatttgtaatttaattgtgccttatactttttataagaatttatagaagaatatcatgaaatactggatgttattatttgcctttttgtgggtatcttacggaacgggcatggctcggaaaaccgaaaaagtagtaaataacggaattccctggtttgacgacaggggagagattgtcaatgcgcacggtgcctgcattgtggaagagaatggcagatattatcttttcggggaatataagtcggacaagagcaatgcttttccgggtttcagttgctattcatctgatgatttggtgaactggaagttcgaacgtgttgtactgccgatgcagccaagcggaattcttggccctaatcgtgtaggcgaacgtgtgaaagtcatgaaatgcccttctaccggcgagtatgtgatgtatatgcatgcagacgatatgaactataaagatccccatatcggttatgctacctgcagtactatagcaggtgaatataaacttcacggacctctgttgtatgaaggcaagcctattcgccgctgggatatggggacttatcaggatacggacggtaccggatatctgttgttgcacggaggaattgtctatcgtttgagtaaagactaccgtacggcagaggaaaaagtggtatcgggagtgggcggttctcatggagagtctccggcaatgtttaaaaaagacggcacatatttcttcttgttctccaatctgaccagctgggagaagaatgataatttctactttacagccccttccgtcaaaggcccgtggaccagacaaggtttgtttgctcccgaaggaagcctgacctataattcacagaccacttttgtgtttcctttaaagtgtggcgaagatacgattccgatgtttatgggcgaccgctggtcttatccgcatcaggcttcggccgccacctatgtgtggatgcctatgcaggtggatggaacaaaactttctattccggaatactggccttcctgggacattgataagttgaaacccgtaaatcctctgcgcaaaggaaaaaccgtcgatttaaagcagataacgttcagtaaagaagctgactggaaagtggaggaaggaagaatatcttccaatgtaaaaggaagtacgctgagtattcccttcagtggctcttgtgtggctgttatgggcgaaacgaactgtcatagcggatatgcgcgtatgaatattcttgataagaaaggggagaaaatatattcttcactggtcgatttctatagtaaggcgaatgatcatgcaacgcgttttatgactccccaattggcaaaaggagaatatacactggtgattgaagttacgggcatcagccccacatggactgataaaacgaagagaatttatggcagcgacgattgctttgtgaccattactgatattgtaaaattgtaatatttatgaaaaatagaatcttattttccgtccttgcttgggtagcagtgatcttctccgttcaaggtaaacaaaaagattttgtcttgcagtccggtcagccggttgagatagcttgtagcggttcggaagtaccggtggtgcgtacttcgctggacttgttgtcccgtgaccttcagactgtattgtcggcaactgcccatgtagacacaaacaccggaaacatcatagtaggaacgatcggacagagcaagctgattgagcaggcaggtatcgatatttccgcattaaaaaacaaaaagcaggctttcatgctcgccgtctcagaagatggaaagctggtagtagccggcagcgacagtcacggtacagcctacggcatacttgaaatatcccgtttgctgggcgtttccccttgggaatggtgggcggatgtgactccggagaagaaagagacattccgcctttcgggcaagtttagagagttgcagtctccttctgtggagtatcggggcatctttattaatgatgaagattggggactgatgccttggagtaacaagacttacgaaccgtcggatgtgaaaggagaaatcgggccgcgtaccaacgaacgtatttttgagttgctgcttcgtttgcgggccaatacctactggcctgctatgcatgagtgtaccttgcctttctttctgacgaagggcaatcgggaagcagcgaaaaagtatggcatctttatgggagcttcccactgcgaaccaatggcgtgcaatgctgccggagaatggaaaatacgtggaaaaggagcatacgattacgtgaataacagtccggccgtttatcagttttgggaaaatcgtgtgaaagaagttgccggacaagagatactttacacgctgggtatgcgtggcgttcacgatggaaagatgcagggagccaagacggtagaagaacagaaagccgtcctgaaccgggtatttgttgaccagcgcggcttgctcgaaaagtacgtgaataaagacgtaacacaagtgccgcaggtctttattccttataaggaagtgctcgatatttatcatgcgggactgcaagtgcccgaagacgtgaccttgatgtggtgtgatgataactacggctatatccgtcatttccccactgccgaagagcgtgcccgtaaaggcggcaacggagtctattatcatgtttcctactggggacgcccgcacgatcatttatggttgagcaccatgagtccatcgctcatttatcaacagatgaagcaggcttacgatcagggaatacagaaaatgtggatactgaacgtcggagacatcaaacctgccgagtatcagatagaactgttcatggatatggcatggaatctggataaggtatcttccgaaggagtaaccgcacatctgaaacattggctggaacgggaactgggaacctcctgtgcaaagaccatcctccccgttatgcaggaacattatcgcttggcacatatccgcaaacccgaatttatgggaaatacacgggaggaagaaaagaatccggtctatcgggtagtcaaagacttaccgtggagcgaaagagagataaacgaacgtctgaatgcttacagcgaactttcggaaacagtagagaaagctgcttctaaagtacccgccgacagacagagcgcttacttcgaactggtgaaatatcccgtacaggctgcgacacaaatgaatcgcaaactgttatacgcccaattggcacgccacgataaggaagactgggaaaagagtgatgccgcttacgacagcattgctgcactgactcaacattataactcattggagaatgggaaatggaatcgcatgatggacttcaaaccccgcaagctccctgtattcaaccgtgtggaaagaaatgcggctactgctccgatgacagcggaccgtaaagcagcctgtcaatggaatggggcggaggcaaagaagggcaacgctattgtctgcgaaggtttgggatatgaaggcaaagccgcagagataagaaaaggcgatgcgctgactttctctttcggtaatctgaaaacggactcggtagaggtggatatccggttacttcccaatcatccggtgcatggcgataagttgcgtttctcggtttctctggatggtgccgagcctgaagtgatagcgtacgaaacgaaggggcgcagcgaggaatggaaagagaacgtgcttcgtaatcaggcaatccggaaaatcgtacttcccgttctgggcaggaaatcacatcaattggtcatcaaggcattggatgagggagtgatactggatcaggtaatgctttatgaggtgaattagatataattctatattttatagtttcagactggctgggtcagtcagtctgaaatacactgtttattgtcccggcttgataatcaaccgcagtacaaaccaagcgtgatgtgctgcggtacttatccatccataatgttttgccataatgcggaaccgttctttaagagaagccttccggttctgcgtagtcattccttcatccagatagtcgatgattgtcaggtgcgtattgtgcagggtacgcgcctttttcatgatgcggatgcaccagtcgaaatcagcggagtaccggtagtttaagtcataaggttccatcagcgtatgtctggcaaagaaagcctgatggcagactaacattccttgtttgaaactcttccagtccagctttttgggcgtggaaaggcggcgcatatgcagaaagtgcctgtctttgtcaacaatcgcagtttccccgtagatgacgtcggggagaacgctcccatgaatgctgtgcaccatttgctgcaaagtatcgtcttcgtgaaagcagtcgcccgcattcagaaaacagagatagtcgccgctggcaagggaaatcgccttgttcatggcatcgtacaatcctttgtccggttcgctgacgacggtagttatccgtggacggtatctgtcgatgatagagagagtaccgtctttggaggccccgtccacgatgatgtattctacgtggtggtaagtctgcgagataacactttggatggtatcttccagtactttctcggcattgtaggtcaccgtgataatcgagaacttgggagtaggatggacactatgcatatttccctgttattttgttgtaaacgtccgtgtacttcttcgctatgatactttccgaatagttgcctatggccttgcggcaggcttgtgcggagagttccgcatattcgggttccgtcagtacccaatggatgccgttggccagatcttcggaagacttgcgctgagctacgtatccgttgtgcagatgatcgatcatttccggtatgcctccggtgttgaaaccgacgcagggcacaccgcaggacattgcttccatcaccatattcggcagattctcttcgagagaagggatggcgaagaggtctacggcattgtatatatccaccaactcatgctcattcttaatataaggaagcggatagacgcggaaaggaatcaggtcttgcaactgctgcgactggttgccgaaaacaaccacgcccaatgagtctttccattccggatgtttctctgccagcagtttgcaggcttcaatcagatagtcgataccctttcgcttgtctgtgatcttgacagaaccgaaaagaatgagcttcccttcctgcggcagcctgcattttctgcgggcttcctgcttattgtgaggcttgaacagattcgtgttgatggcgttcgggatactgataaccgtttgtccggtgagcagtccgctgactttggccttctccgccagccagcggctacagcctacaaacgtgatggatgcctgactataaatctcttttttcttccggaagattcgggtggataagtccttcttgcctcctcctccgtagatgtaagggcagtgatggcactcctgttcgtaactcttgcattcgcgtgcataatggcagatgccggtgcagggccacatatcgtgcatggtccatactacaggtttgccggaagtcagaatcttgcggatggtgttgagcgacagcatcccttggttgatccagtgcagatggatgacatctgcctgctgaaattcgggaagcgaagtgatgtccgtgccggtattggcgatatctacggcaaagagatcattcttcttgaaacggttggctttccagatgacgatgcgttcccacataaatttccatacgtgcagccagctgccctttagtccgacgacgctgatttggtctgtttgtttgtcacgtaccaacattttcgccttgatgccgttgttcttaagcgattccatcagtcgtccggcagcgacagccgcaccacctattcgttcggaagtattgatgattagtaccctcatgctttcaaaatgtttgcacaaaagtagtggttttcagtgaaaatccgtacaaagtcacatattatttgtacttttgccacacttattaataaggagatattgaacatgaaaaaggttgtgtttttaggattagggtatatcggccttcctacggcagccgttgctgccgctcacggtttcgaagtcataggagtagatgtcaatccttctgtggtggaaacgatcaaccagggaaagatacatattgtagaacctgaactgggtcaggtagtcagggacgtagtgcaaagtgggaagttacgcgctgtatgcaagccggaagcggcggatgctttctttatcgtagtgcctaccccattcaagcagaaccatcgggcggacatcacctatgtggaagcggccacccgttccgtgatcccttatctgcaggagggtaacctgtttgtcatcgaatccacttctccggtatataccaccgaacgtatggcggaagtgatctataaagaacgtcccgaactgaaagggaagatacatatcgcttattgtcccgaacgcgtattgccgggaaatacattatacgaactggtgcacaacgaccgcgtgataggcggcatcgatccggcatccaccgcaaaagccattgagttttattccgctttcgtacaaggcaaactgcacggcaccaatgcccgcacggcagagatgtgcaaactgacggagaactcctcccgcgactcacagatcgcctttgccaacgaactctccatgatctgcgacaaagccggaatcaatgtatgggaactgatcgaacttgccaacaagcatccgcgtgtgaatatccttcaaccgggctgcggagtaggcggtcattgcattgcggtagacccttggttcatcgtatccgactatccggaacaggcgcagctcatcaagcgtgcccgtgaaacaaacgattacaaagcggactggtgtgcgaacaaagtattggaaacctgccagaagtttgtagaacagaacgagcgcgaaccggtcgttgcctgcatgggactggctttcaaaccgaatatcgatgacttgcgggaatctcccgccaaatatatcgcctcccgcatcatctccgaatcgagagcggacgtgctgattatcgaacctaatataagcactcataagagcttccatctgacagattatcgggaagcatacgagaaagcggatattatcgtctggctggttcgccacgatgtcttccttgcattgcccaaagaagaaggaaagatagaactggacttctgcggtgtgagacgataaaatgtagtttaattgcgaagaggttgtatagactctattaaataaagcagatgaaaaagatattgctcgttttcggtacccgtcccgaagcgataaagatggctccgcttgtaaaggcgctccagaaagatacggaacattttgagacacgtgtctgcgttacggcacagcaccggcagatgttggatcaggtattggaagtgttcggcatcactcccgaatatgacctgaatatcatggctcccaatcaggacttgtatgacattaccgctaaggtactccttggactgcgcgaagtgctgaaggacttccgtcccgataccgtattggtgcatggagatacgactacctcgatggcggcatcccttgcggcattctatatgcagatacctgtggggcacgtggaagccgggttgcgtacctataatatgttgtctccctggccggaagaaatgaaccgtcaggtgacagaccgtatctgcacttactactttgcaccgacggaacagtcaagggcaaatctgctgcaagagaatatagatgcgaagaaaatctttattaccggaaatacggtgatcgatgccctgctgatggcggtcgatatcatttccaccaccgccggtgtgaaagaaaagatggcgaaggaacttcaggagaaaggctacacggtaggtgatcgtgagtatatcctcgtcaccggacatcgtcgcgagaacttcggagatggtttcctgcatatctgcaaagcgatcaaagaactggcggctcttcacccggagatggacatagtctatcccgttcatctgaatcctaatgtgcagaagccagtgtatgaactgctttccggtctgagcaatgtctacctgatctctcctttggattatctgccttttatttatgccatgcaacattctactctgctgctgacggatagcggcggtgtgcaggaagaagctccttcattgggcaaacccgtgctggtgatgcgggatacgaccgagcgtccggaagctgttgaggcgggtacggtgaagttggtcggcacggatgcggaggcaattgtcagtaatgtcactgccctgctgcaagataaagaaatgtataagcggatgtccgaaacgcataacccttatggtgacggacaggcttgcgaaagaatcatagccgcgcttcgataacttcaaaatagtttcattgcttgaaaccattggtttctcggtgtgaaactgttggtttcaaggcatgaaacttttagtttcagagcatgaaacaaatcatgccgttcgttggcgccgatggcgggaccgggcgaaacaaaaattaataacacttcttatcgggaatgccctctaacgaaaaacgggctgtcagagaatcacttctccggcagcccttcttcattaggatcaaaaaaacagaggaagtatgatattctttattcctgtcctcaccctaaagcacggtataggttaattaaactttgtatttcggtaaaatgattggccgtctgtgatagttgcgcgctgagcaatgactgtcgggcggtaagtacttccagataggttgtattcgtatgttccatcagcagagaagtacttcgcacggctgtttgcagagaagcaatctgcttgtcgagcaagattcttttcccctgactggtctgataggcagtcagcgcatcattcacttcgctgccggcgttgagcaatgtttgctgaaagccgagagctgcttcttcctgctgcgcacgggcgatgcgatactgagccaccacttgtcctttattaaagagcggctgcgtgagcgaacctactgccgatgccaggaacttgcccggattgagaatcatagacccgacggagttcgtccatccggcacttccgctcaacgtgatggaagggtagaaagccgaacgtgccgcattggtgccatagaacgctgcttccagcgtccgctcggccgagcggacatcggggcgggcggcaagcattcggacagggattcctacggcaaagtccgtaggaaactgttggtctgccaacgttccgcgttcgtagttgcggggtgtctctgccaataataaagcaagactgttctccacctgattgatctgctgctgcaaatcgagcacagaaccctgcacctgataataggtcgcttccatctgcgatacagccgattcgttcgccagtccggcgttcatcagggaacgggtagaggctacggtttctttccatgcctcctccgtctgtcgggagatgatgagctgttcgtccagcatcagcagcgtgtaataagtattggctataccggctatcagctgcgtgcggactgcttgacggtaatcttcactttgtgcatacagcgctttcgcctgcttcttggagttgcgcatacggccgaatacgtccagttcccaactggcggtcacgggcagcgagtaaccctgcgtagttttgttcgtatcgaagctgctcactgtcccctgcggggaaagcgcaaaggcgggcaggaaagcaagtttggcggacatcagcactgcctgagcttcttctacacgaagctgggcggactggtagtcggtattggtccgcaaccctgtctcgatgagggactgcagatgagggtcggtgaagagttcccgccagtccatattccccagaccggcagtgtcttccgtcaccacttccccgccgtaaagatcgtcggtgacggaagtggcgggcttgtatttggtatagatgccacaaccgctcagcgtcagactcatggcaactaacaggatgatatttttcttcattctttcttttatttattaacgttcacgttcagcttcacttttctctttttctaaaagcacttgtacatctgcttcttcttccatcggtttgcggattttctcctgcaagtattcaaagatgatgtagaagaccggaacgacaaagagcaatgccaccgttccgacagccataccgcctacgacacccgtacccagcgaactgttgccattggcacccgcaccggaagagaacatcagtggaagcataccgaagatcattgtcagcaccgtcatcaggataggacgcaggcggacctgtgcggcagagtaggccgattctacgatgcccatccctttgcggcggcgttcgatggcgtactccgtaatcagaatagccgtcttggccagcaagccgatcagcatgatcacacctgtctgcaaatagatgttattctccagtccgagtatcttggcgaacaggaacgagcccatcaatccgaacggtacggagaagataacggcaaacggtacgaggaaactttcgtagagacaagccagaatcagatagataaggaagatacagatggcgtagatgaaaaccgtctgcgcaccaccgctgcttgcttcttcgcgtgccataccgccatattcgtatccgtagcctatcggaagcgattctgcggccacttcttcaatcactttctgcacttcacccgaagagtaaccgtcggcaggattcacattggctgtgatggtgctgtagaggttgaaacggttggccgtttccggtcccagtacctgtttcagtgtaacgaactggctcaccggagccatttccgtaccgttgcgcacaaacatattgttcaatgcctgctcgtccagacgatattcgggcgatgcctgcatcatgacacgatataccttaccgtattgattgtagttggagatatacgctccaccgcaataactgcctaccgcatcgagtaccgcgcttggcgaaattcctgcacgcttacatttggcggcatccacttctaccgagagctgcgggaagttgatggcgtaggatgtataagccatagccacttccggacgctggttcaaggcgttgaggaactgtgtggacgcatcgtagaacgtagccagatcaccgcctgtcatatcctgaaggttcagttcgagggagttacccataccgtatcccggaatcatggcgggttggaaactgaatatctgcgcttccttgatggactggaattgtgcgttgaggcgggaagctacggcatccgaactgtgttcttttccttttcgttcgctccagtctttcaggcggacaatgatcgtaccgtaagaagttccctgaccggagatcagaccgtatcctgctacgcgggcgtagtgttctatttcgggcgtatctttcagaatgttttccagccggtccattactttcgtcgtctcttcgagcgtgcttcccggtgagatgctgacattcaccatgataacaccctggtcttcctgtggcaccagtcccgtcttggtcgtgctcatcagataaaccagcaggacgatggtagcagccagtgaagtccataccatccagcgatggcggatgaagtacatcacccctttcttatacttgcccagcacggcattgaacgaagcgttgtaagctgcgcgtacccgtccgttgatactcttggcgctcttggttccgtccgacggacgcatcatgatggcgcacagggctggacacagggtcagagccgagatcatggagatacctacggcagttgccatcgtgataccgaattgcgtatagaacacgcccgaagtacctcccatgaaggtgacggggataaatacggccatgaagacacaggtacaggagacgatagccatcgtcacgtcgcccatcgcatctttggtggcaaggtagggcgacttgtatccggcgtcaaacttggactgcaccgcttccaccaccacaatggcgtcatccaccaccgtaccgatggcaagcaccagggcaaacagggtcaggatgttcagactgaatcccgcagctaccagacaggcaaacgtacctaccagtgacacgatgatggagatagacgggatgagcgtactcttcaggtcctgcaagaagaagtataccacgaggatgaccagaatgatggcgataatcagtgtttccaccacgttgtgtatggaagcgaagaggaagtcgttcgaactcatcatggtgacgaactccgttccttccggcaggtttttctccatccgctccatctgggcggtgatttctttattgacagcggtcgcattggaacctgccgtctggaagatcatatagagcacggcaggctggctgtccatctcactgcggaaactataagtcatagtgcccagttccacatccgccacatctttcagacggagtatcgagccgtcttcacgagagcggacaacggtgttctgaaactcttccacgctcttcagtcttccgcgatatttcatcgtgaactggaagacgttctgcgaactctcgcccagtgagccggtaggggcttcaatgttctgctcgcccagcacgccggtgatgtccgaaggcaccagtccgtattgtgccatccgttccggtttcagccagatacgcatactgtaggtatcgcccagctccatgacgtctcctactccctcgatacgtttgatctgcgggatgacgttgatgtccagataattggcaaggaaggtctggtcgtagcgaccgtcggtgcagaccatcgcgccgatttgcaggaagctggtctgtcgtttcatcgtgcttacgccgactttcgttacttcggcgggcagcagtccctgtgctttggctacacggttctgtacgttgacagccgccatgtcggggtcggtgccttgcttgaagtaaacctgtatgatagccagacctgcattggaggcgctggacgtgatatacatcatgtcttccaccccgttgatgctctcttccagcggcatgatgacgctgttcatcacagcttcggcatcggcgcccgtatagctggcggatacatagaccgtgggaggcgcgatgtcgggatattgctccaccggcagggtgaagagcgagataagccctatggcgagaatcagcacggagatggagatagccatcaccggccgtttgataaatatatttcctttcataatcagtctccttcttatttaacctgtgtgccttcgcgcaccagtccggcgccttccgatacaatttcgtcaccggctttcaggccgtccagcactacatattcgcgtccgtcgttgattccggctacggtgatcagggtggagactgctttgccatccactaccttatatacaatcgtcttgtcctgcatccgcacggtggctgtctgggggatagcgatgcagttcttgtagatgcttggcactactaccgtgcccgatgctccgctatgaagcagccgtgattcgttgggaaacaccacgcgtgccactacggtccctgtctgacggtcgatcactccactgatggattcgatggtacctttcttctgatagactgagttgtcgttcagaatcagttccacttccggcatattctttaacgcttcgtccatgtcgccgtactgtcgggtaagggcgagcagttggttttcggtcatcgagaaatagacgtacatatccgaattgtcactgaccgtagtgagcggataaggaatgttggcgcttaccaatgcgcctgcacgatagggcaatgcgcctacaactccgtcactgggacttttcacttcggtataagagaggttgttgcgtgcgcttatttcctgagcttcagcctgtgccagttgtgccttggcggtgagataagagttttcggcagtcttcaggctaaattctgaaacgactttctgcgcatacagttccttgttgctcttgtaagtcagttcggcggtgctcgtagcggcgcgggccgcttccacattggcggtggcggttttgagcgcggctctgtaaggtacttggtcaatgatgaaaagcaactgtccccgacgtactttctgaccttcggtcacgcagagtttctcgattgttcccgacacttgcggatatatgtcaatatcctgtcgcccgcgtatggtcgccgaataggaggaagaaagttctttgtccgttggttctatctgcatgactgcataagaagatttcactcctgcatccggtgcctgtttgcacgatgccatccacactgtacaaccgacaattcctatcagccgtatccattttttgttcactgtaatcatacttactctttttgtcttttattaaaatcagaacaaaagtaggagaaaagaacaagtcaatggtgaccgatttttctctatgaatgtcctgtttccgttatttgtatttgttgtggctaactatttgcgtataaacgacatatcaaacaattataaaggagtttgggacattctgttttccctattatttaccaactttgcaaaaaagtaaaaaaggagaggctatggaaaaagagaacattatgacagtagatatagaagactttaagaagagtcagcatatccttgattatatagacgatgattttgcgatagtcaacagtctggacgggattccgtatagtaatgatacggtccggctgaactgtttcctcattgccgtctgtgtggaagggtgtattcagctggatatcaactaccggacgtatcagttgcaggcgggcgacttgctgctcggtcttcccaatacactgatcagtcgtacgatgctgagccctaaatataagataaggctggcgggattttctacccgttttctgcaacgcattattaaaatggagaagaaaacgtggaataccgctgcccatattcacaacaatccggtgaagtctatcagcgaaggtggggacgaacctgttttcagattctatcgggatttgattgtggcgaagatcaatgatgaacctcattattatcacaaggaagtgatgcaacatctcttctccgccctcttttgtgagatgctgggacagcttcacaaggaaattgatgctcccgataagggggacagcccgaaagaaggtatcaaacaggcggattataccctgcggaaattcgtggagctattatcgaaggacaagggtatgcaccgttctgtgagttattatgcggatgcgctttgctacactccgaagcatttttcgaaagtcatcaagcaagcgtgtggcaggactccgttggacttgatcaatgaaacgacgatagaacatatcaagtaccggctgaaacgttcggacaagtccgttaaggaaatagcggaggaatttaatttccctaaccagtcctttttcgggaagtacgtaaagatgcatttggggacttcaccggctaattatcggaatcgcaagaatgagtgagacgaagaatctcttggaaagccttcaggtagcgttcgctgactgtctccatattgatcttttcccggatcatccgttccgactcttttcccatctccttgcaacgttcgggagattcgaacatctctctgattctatctgccaggctatcggcgtctccgtctttgaagaaatagccgttcttgccttccatgaccaggtcgcgttccgtactgtcgcatacggcacaaaggacgggcataccatacgtcatggcatcgttgatcgaaagccctcccatgccggcaagcacatagatactcgattcgttcatataggcgcccagcgttttcgggtcatagacggctccgataaagcggatgctgtctgtcagttgcaggtcgtttgcctgttgtctgaggttgtccagttccggtccgtctcctacgatcaccagttccgcttccggatagtcggtggctaccttccggaaagcttctatcaataaatctacccgtttccattttacgagccgtccgatgtgcagcaggcgacggtcgcacgggggaaggatggagggggaagccaatacggattctttttctttgagaagtgcttccgtatcggtcgagttgtaggtgacgtgtatctgctccttctttacttcgtaagaggggaggatgtcgtaggcggctgtcgagtagttcagcgttccggcggcttgggcgtagcagtatttccgtatccttgccgttatccattggcgcagatagaatccggtacccttgctgagcaggcgcataccttcgtcgtgcatcggattggctttgaaatattccttgatctttccgtagggaggagtctggaaggggatttcacgaatcaccagcttggcgttgcaggacttcatagcctttctcagtgcgggctgaaagaatacttgcaggaagtagggccatcctactaccactatatccggtttttcttccgcaatgatttcgggaagggcggggaaagcgctttttccgtagaacatctttttctccggtgtggtcagatgcttgtaggttcctccttctaccattttcacccctttaccgatggtcgtattccctttcttcgggctgacaacggttatttctactccttttgcctgtagcctgttgagcatggcattcaggtagtgggggattcctccgaatgtaaaaagtactttcattgtatatgcttgctgatttgattaaaacatatgattagtttctccacttcgtgttcgtgggcgtaccgggcgaaggcctgagtgtccatccttgtttcggtacacagcgagcggatagctgcgctgcattcttcggcgttgtcttctccggtggtttggcctgttccgtactgttctaccctccggcccatgcagaggctgcggctgactaggaccggtttgcggaaggcggcagctttggtcaggaggttgctgctgccggtgaactgcttgtatgcggcaaaaataaggtcgctctccgctatcagggcattgaaacagctttcatcgggaattttctccaatgagaacagacagttattccttgactccccgaacgcccgcaggttgttttcctgttgtgcggtgagagatgatttccccgcaatgaggaagaaatattcatcctttggcaataaagggatactctctaacagtaactttatccccttgcggaaattgatggaaccgagcagggatatcaccttccttcctctggctttctccttcagtttccgcagcaacgggtagtttgtggcgggagccgaaagatcggcaaagtcgggaaacagcagaatgtggcgctgaaatgtttccaggtctttcgctgaatattcgttcagtatgcctactcctacgcagttcttgcttcgcaggaaagggcgtgtatcgggcatccctcggtggtaaggcggcagggcggactgaaccagcaggccgctccactgatagggcagcaaaagattgaacagccataagggagccaatgtaggcagcatatcgtcgaggcaggcgaagaagaccagatcaggtttcagccgttgaagactccggcgcagcctgtacagatttcgcagccgaatcactgcattgcgcagtacaaccagctttttctgcaacggttttccggcagggagcggcagcagcggaagcgctgagacaggctgaaaggcaacggtctcctgtacacctttcccatcgggagcgatgagcgacgtttcgtgccccatgcccgcccatgtctgagcaaactgtttataatacgtttcccgatggcctgatactgaacaatctatgactgtaactttcatgattccgatgcttttgggggcttggacatttctaatgcttctgaataaacttgccgtaacttctgccctgccaactgaaagtcgaagcgactgacgatagactggcggattttctctttgtcgaacgactcgtaggtgtcgtacaatgttttcatcttagcggcgagcgcatccacatttcccggtcggatgaggaagccgctttcgggagtgatgatgtcctccggtcctccgcatacggtgccgatagcgggcaagcctgttgccattgcttcgatgaatacgatgccgaatgtctccgcaaaggaggccagtacaaaagcatcgcaagtacccagcaacccggacaattcttcccgtgacaggcggccggtcagttttacctgctcttgcaggtggagagactgaatctgctctttgagtgactgcatttcttccccgtctccggcaatgatcaaagagacgtgcggcatatccttgaatgcccagtgaaaagcagtcagcaaatcccagaatcctttacgcttattcaggtttccgatgctgatgaaagtgaaatgtttctctttctccgtccggtgagggctgaatgcaaaggtgttcgtatctacaaagttcggtatgacggtcactttatccgggtcactgacgtatgcgcacaggctccgtttcagtttcgtgccgacacagatgatcttgcgtgcctcgctgtatgccttctttagtatcactgcctgtgatggtgtcgtctgattgccgttgatggaagaggcgtgctctgtgatgacatagggaatcttataccatttataaaccagtcgtgcggcataccctgcccatgtgccgaagtgcgcatgaatcaggtcggggcgaccgtaagtgcggatatacttccgtactaacaagacggtcagcagagaccagatgattcctcccgcgcgggtgcttagtttcgggttccatgcgtgcatgcgcatggtgacgaaactgccgttatcttctgccgatatctgaaaatgactctctttacggaaccgtttccatgtgaagttcttcagaggcctttgctccgtgaaggcaagtcctgtccggcagcctgatttagccagttgcatagcctgctcgaagaacatatatccccggtgcggggaggagtccttctcaggatagtacattggaagtatcagtatatgcatttgtcttttatttttagagaaagaatggtgatgaaatcgcggatgcgtttcccgaaagtaacggtcggcacaccggtgtaggcggaggctttcttgcggaaggcctcttcatcgtcgaaagtgggatggttcacaaagtgtttgtacagcagatacaatcctcttttcttctcgtaaggaagatgccataccgccagttgttcgtctcctttttctaccgtattgtatttggggtaggtccagaggcgtttgacgtattgattggcgatattgttgtggatgttgagtctcgttgctactacgctcaggaagtgggcttcttcgttcagtttgggctgattggcggcaaaacgttccagattataattccataaagcaggatacgcttcgttgattcgtgctactacatcaccacgcagcgagataaattctcccccgtagtaatggacaagctctgttcttgtgactccgtttttcgtatcttgctgctctgcttcttccttttccgcttctgttttcttcgttgcctccttctctttttctctcttctctttttctacgtaacagtcattatagatatctgtcatctcctttagtgtgattccgttcacgctgaggtccggtcggtcggatgcatcgtacagggcggaaccgtatttccgtgtgtcgctgaacagttgctccaacggacgcatacagagacagtccgcatcgcagatgagcaacgtatcgtccgcttgcatccttttctccatatagcgcaggatgtcatacaggtagaattgatttctccatgccccgtaccatcctttgggagggatgcagagataaggcagggtaacagtctcaatccgtaactccttgaataatcgttccagataatcgggaaactgatccagattgctgaagaaaagcaacttgtcatccggatgataatgcctgaaagtggtaaagaacggcacttgtatctgcatataaatggaatggacgagggcggaatctccccgtttgcctgcctgcggatagaaactggcatcttctttggattccttgtagaaccaagtcgctatgtaattggtaggtgtcgtcatgatatctttttctttttaatgaactgaatacattccttgaaaatgactgattgcattttccacaaaacaagtgcatatagagaagccacgaaaaacactttgatggcaagtgacaaatacagattagtgatgcccgacgttatgtaatgggctgcgattgtcagcgaagctgccagcagaaaataaggagcgatatctttcagtatgctgaacagcgtcagcggaatctccctccgggcaaagcagtaccagacaaacagccacccgatattgatagcgacaaacagataaatcatggtggtgatgccgtatggataactgatacaggcagtgatcagctgcaacacgctcagtgcgatactgttgaacataaagatggaagaccgtccgcggctgaccagcaataaggagaacagattgttgatcggaataaaggctccccatatacaaagtaattgcatgatccgtgcggaagcgagccatttgtccgtgatggcaatcagaataaattctctggaaatgagactgagcccgaacatggcaggaaaagaaataaaagccgtgaaacgcagcattttatgaaatacggccgcctgacgctgcgggtcattagccacacttgccagtacgggctgggtgactccgttgatcattccggtgataagggcgtgtcccttattgttccagttgttggcctggctgaagtctccgacttcctgtttggtatagaatttacccagtaggacggagaataggttttggttgatgataataaagacttgtgtaatcagcattttactgctgaatccgaacatctccctgatgggagaaaaatcaatgcggaagctgggcttccagtgggcaaagtaccagttgagtgccgtgcctatgacgacaaaggtcattgtctgtatagccagaccccaataggcaaatccgtttgcggcaagaataatccccacaataccggatagaaacaggcttgaaagagaaatgatggtattctccttcactttgagattacggaaaagaagagctcgtggagctatcccgaaactggctataaagaaactgaggaaagagaaacgggcaagcgacgttaactccggagtatcataaaatttagcaatcagcggagctgaagaatagagcaaaatataaagaacagcactaaaagagatactgaaccagaatacagcgttatagtctttatcgctgactttctcgcgattggcgagtgctgcgacaaatccgctttcctgcagggcggaagcaatggccggaaagatagccagcataccgatcataccgtaatcggcagggtccagtaatcttcccaacactactccgaaaagaagtcctaacagctgttgcacactgctgctgagccctccccaaaatagcccttttgctgttttttgtttcagtgactgttcttcactcatattattataccatatttcactttctgaatcctattggattacgtggcttatccgctattgctttttgcgcttgcagttcggccagtgtttgattgatcagctccaattgtgtgcgggtatcctcattaatatcattataatcggtgaaggcctcttcgatataatttttcagttcttccatctgattttctaactggccgactctatctacaggaaatttggcaattagttgccgtatggcaacaaatgcacgtacaatcagaacactggtctgtatggcaatatcacttcggagtatactggagagcattacaacaccgtgttcggtaaatgctagtggaagagcagatttcggacgtttggcacgggatgtcatcacaaattgtgatgacatatcttcccattcctcatttgttagttgaaacataaagtcttcgggaaagcggctctgattccgctttaccgattgatttaagatacgtgtctcaacttggtacatttcggccaaatcaaaatccagcattactttctgccctcggacttcatatatcttactctgtattaatgtgagtgtaatatccattagcttatcacttattttacttcgctgcccggcttcacctctttctgaggcatgataactgccagactaccgtcgttgttttcggcactcagaatcatgccttcgctgacgatacctttcagcttgcgcggtgcgagattggcgataaagcaaacctgcttgcctaccagttcttccggctggtagtgctttgcgatgcccgatacgatggtacgtgtttccagtccgtcgtcaatcttgaattgcagcagcttgtcggctttcggcactttctgacattcaaggatggtaccaacacggatatcgagtttcgtgaaatcatcaaattcgatgttcggacgaatcgggtttgccttatagttggcttcttcgttggccttcttcgtgtcgagcaacttctgtacctgtgcctcgattacgctgtcttctattttttcgaacagcagttccggcttgttcagctgatgtcctaccgggagcagatcgttccttcccagttccgaccattcgaagctttccatgttcagcatcttgcgaagtttctccgagctgaaaggcaggaacggttcgaaagcgatggcaaggttggcaaccagttgcagagagatgttcaggatggtgcctacacgttccatgtcggtctttgccagtttccagggttcggtgtcggcaaggtatttgttgccgatgcgtgccaggttcatcgcctctttctgcgcgtcacggaatttgaatacgtcgagcagcttttctacttctgcctttacgtcggcaaattctttcagggtttctttgtcgtaatccgtcagttctgcgcaggcgggtactttgctgtcgaagtatttctgagtcagcaccattgcacggttcacgaagttaccgtatacggctaccagctcattgttgttgcgtgcctggaagtctttccaggtaaagtcgttgtccttcgtttccggagcattggcggttagtacgtagcggagtacgtcctgcttgccggggaagtcttccagatattcgtgcagccataccgcccagttgcgggaagtcgaaatcttgtctccttccagattcaggaattcgttgctcggcacgttgtccggcaggatatagcttccttccgctttcagcatggcggggaatacgatgcagtggaatacgatattgtcctttccgatgaagtggagcagacgcgtttcggggtctttccaccatgtctcccaactgtcgggaagcaattccttggtattggagatgtatccgataggagcatcgaaccacacgtacagcacctttccttccgcaccttctacgggcacagggataccccagtcgaggtcacggctgacggcacgcggctgcaatcccatgtcgagccagctcttgcactgtccgtatacgttggggcgccattccttgtggtcttccagaatccattggcgcaaccatccttcgtgtttgtcgaggggaagataccagtgcttggtctccttcatcacaggtttgctgccgctgatggcgctcttcgggttgatcagatcggtgggcgacagggaggttccgcatttctcgcattggtcgccataggcaccttccgaatggcagtgaggacactcaccggtgatgtagcggtcggcgaggaatgttttcgcttcttcgtcgtagtattgttcggatgttttttcgataaactcttctttgttgtatagcgtcttaaagaaatctgaagccagctcatgatgcgtcttcgaagtggtgcggctgtatacatcgaacgaaacgccgaattcttcgaacgatttcttgatcagatagtggtaacggtctactacatcctgcggagtgactccttctttctttgcacgaatcgtgataggtactccgtgttcgtccgaacctccgataaacaatacatcttctttcttcagtcgcagatagcgcacatagatatctgccggtacatatacgccggccaggtgaccgatgtgtacaggtccgttcgcatacggcagtgccgatgtgacggtggttctcttgaatttcttttccattgatatagagtgattttatgattttactgcttgcaatgtgcaaagatacggtttgcaacgtgcaaagataatgctttccacagatttcaggaagaaatgtgacaggaaatctgtggaaaaggcttgtttagcctgtgccgttttacatcatcatattctttctgatggagaacttcactattgccatatcctgaatggtgtctacaggcaagtccatcggctcgtggtgcggattgtagctgacgagtttgacgtacccttccttctctgagcggttgacgtatttcaccgtcagatactggtctccgtcgaggtggaacgccacgatgtacatttctccgtaaatgacgttgctgaaattgttgatccccttgaaccctacgatatctcccgatttgagaatgggatacatactgtctccgttgacaaagatggctccgtcgcacgcgggtatgcttggaatcagtattttgcccagcgcatattggcgcttgtcggaaagtagggttcttaaattggcggcggctgtgatgtcatagagtgtcacactccggtcgtctatggcttctgtggtttttgaattgtgaatagtctctacttctccccgtatcttcccgttgtcaaaagactttgggtcgtgcagcggacttccttttccggttagcaaccagttatagtctacatgatgcagcttgttcagcagtaagggaaagtctatgctgtttcgcgcgcaccaattggaaagtgtcgctctggctactcctaaatatgatgcaagttcactgtcccgtttcagattcaacgctattttcgcccgctttacgatttccggtacattcagcagtgtatccgcttgtttctcattcatgtttttgcttacttttttatatgttaatatttattcttgtcttatcgcctcatatacagtcttttgtaaaataattcagcgttaatatctaaaatcatttgttttatatatgcgactttctatacctttgtggtattcgaaatgaatatttgatttcaaaattagaaataaaaattagataaaccatgagaaaacaagaaaaagatgcgaaatactttcaaaaaccgcattctcccccctccgaaaagagagctgtcagctgttaatagttgatttgtcaggagttaacagttgtcatattgggtattaacagctgacgtgatggctgttaacatctgacgggcaagttgccaatgatcattgtgtaggatgtgaacctcctgtgcgcaggctgccttaccttttatctgaaaacatatcaagtatatcaaaaagaataaccggaatggaaacattacaaaaacaaacactttacgtttgtggctgttgcaaacacacgcttccttcagaagctttttacgtagataagaaaaccggtcttccaaacaactactgcaaggaatgccgcaaatccgccagccggaaatacaggaagaccgagaagcgcacgctggcacgtgacgaccgtgaaccttatcccgttatcacctctacgaaagaccccgatcttcgtcagaaactgattctgtccgccctgcagactgtaagggcaagtatcaagcggaaaaagcagaaactttgtgaagtggaagcggaactgactgattaacaaaatgaaaaaactgactgataaactatttataaaaacaatacaactatgggaagaatcaaacagggactggactactttcccctgagcaccgacttcatgcacgaccgtatcgttcgtcgtgtcatgaagcgtgagggcgattccgctttcaccgttttaatctatattatgtcttatctttattcgggcgagggctactatgtccgtgccgacactgatttctgtgacgaactttccgatcagcttttcagtacggacaacgataccgtccgccgtgtcatccgtctgtttcttgaatacgggctttttgactctgcgctttatgagcgttacagcattctgacttctgaggatgtccagcggcagtatctcttcatcaccaaacgtcgcagtcgtcaccatatctgtccggattattgtctgctgccggaagggaaaacaacggatgagcagccggatactgttgccgcaacaggggaaaatgttgcagtatccccggatattgcaacggtatcccgggatactgcaacaaaaacagctctcataaaaagaaaagaaaaagaaaagaaagaaaacatcctccctaaccctcctttcgcaaaaggaggggatgaagaagaagggagtgaaggagagaaagtagctgaaggagccggaggcgggatgagagaagaatgcgatcagcgatctgccacgaggaaacggaatctgacgcaggaagatatcgaccggatgcaggttcccccggacggatgtccccgcaatttttccggtctgctggagaacctccgactctttcgtgttcctcctgcggaacaatatactatagtgctgaaaagtaattacggtgaaatcggtggtgatatatggaaaggctttagcgtcattcgtggaagcggtgggaagattaaactgccgggacattatttgctgagtgtgctgaataaataatatgaatttgataaatatatgtatattaatatgttatatgcttatttcttgtattaactaacttattaacgcacatttccgaaatcgcttgtatagctgagaataagcccttatatttgcagtgtcaataagcttaacgacagaaactaacaaaaagattaataactaaaaactattacaattatgccagtattatataaacctttccagtctaatctggaagataagaaaagtgggaagaaactgttttatccccatgtagttcgtacaggaaatatcaattccgcacagctttccaaagagattgccgcatattcttccctttctccgggtgatgtaaaaaatacgcttgacaatctggtgacggtgatggcgcagcatcttcagtcgtccgaaagcgtcagtgtggatggcttgggaacgttccgcatggtgatgagtgcccgtggccggggtgttgagaccgccgatgaggtgagtgctgcacaggctacgcttaccgtccgcttccagcctaccacgacgaagaatctggaccgtaccaccgctacccgttctatggtgacgggtgccaagtgtgcccgctatgacaagctggtctccgcacctggtgacggcggatcggttgatgatccgaatgacaagcctggtggtggcagcgatggcggagatgatggagaagcaccggacccgacagtatagcttgttccttccttcgcgggaagaaatataagactaacgactgaactgaactgtaaaaacagaaaaacgaagaaacaagaaagaaactagagctaactaaggatcaccagctaaagactgataaaagataacaggttaaagactaggactttaataagacaatcaactaaacagagaattatcaattaacatgagaactatcaatttgatcgtggtgcattgttccgccacgcaggggaatcgtacgctttctccggaggaaaatacggtaggaacacagagtaaactaaactatttaaagaacgagaaaggaggtaaatgatggcaatgaagaaatcagtatgggatatgatcctgaaggtggttatcgcggtggcgtcggctgtagcaggcgttttgggggctaatgcgatgagtttgtaaggcagctactatccgtttgccggtatcgattagcgatccggcaaacggaaaaactaaactagagatattaaatacaaatgattatgaaagaaaaactatatacattattattttttttattggtgactatatccggaaaggcacaggatttcaatcctggtccggaagcccagaacctgaccgaaagaaagaacgtaacggtggactatgcaacaggattgttccactacaccgtacctctgtatcaattaaagtcaggtgattatgaattacctatttcattggattatattgcaaagggagtgaaggtgagtgatcctgaaggtttaataggtaaaaattggacacttaacgttggtggtatagttacccgaacaatgcgtggtggatttgccgatgagaaatcaggttacggctacctgtggacagaaaatgctgttactccattggaacaggatgcaaggactgtggggcttcgtaaacgggatggggaaagcgatatttttactgtcgtgttcaatgggaagaaggtggattttatcatccgtatgaatgaaaaaagacagatatatgctttgccgttgggacagacagatgttcgcattgagtgtgaaggaacttccacagagataacaggctggactattacagataataatggtgaccgttatatctaccggcagagagaaatatgtgcagatgttgagtatgtggatgtttccacttccaatgctatttcagattccggttatacctcagcgtggcatcttacctgtattcttccatacaatggggcagcgattggtttccactataatggcgatgcaatgttgtctactaataatccagtatcagataacataaatactatgagaatatatgattcatacaagatgacctatcactatgatagacctatgaaagaacagccatttgattttgatcagtatcgatcggattttaactctgcaattgaatcagcgcggcattatttagatatgtgttctttaggaatgcattttaaagtaacaagttcgttaatatcgaattatgtgcaaatcagtcaaataaatacccagccacttttgagtaaatacataaagacaaataatcgaattgtcggtgtgttgtcgaatatctcgaaaatggctagtgtatccacagaattggaagaaaatcttcgaggtttggctaaatattgtagaagtataaataattttaacgctgatatggccggtatgtatttggatgcagcggcagactatataaatgcctgtttgtctgaagttagaactataaaaacgaaagaaatatcgggtggaagcagctataaggttctttctcctttgcctagcatgattgtttttcctgaatatattgtgaaatttacctatttatcttcttcttgcttatctgctgctagtttgtacaaccgagatatggagctactttcgtctgtttcgtttatagggagattaaatgaagtggctttcttcgataaaaacggtataaagacatccaatatgaagttcagttattatgagaagtctgattttccgacctggaaggaggcggggaaagacctttggggatatcctcttgcgaaaagtgaagagggggaatacgacgagtgtggtatgtatgctgttttaaagtctctgaaagatgttgtattatctgatggtggaaagatagagattggatatgagaataacaatgcgagaaatattatggttggaggaattcgtttgaagtcattggtttttagtgataagttgaatgaacgaagcgatactatttcttatggttatcctcaaacaggcgtgagtgtgtataagtctttttctaatgtcgtcagagtttcttatccagaatgtatggataagattgagtatggcagaatacacttggaaggacatccgatagtgaacgtgggtaataatggcttctactatccatgtgtgacagagactgtttcaggcaagggtactactgtctatcgttatcgggtgacttctccttcgtcgacaactgaacttgactatccatattggcagaatggtttattgactgaaaaatcgatgtatgacactaatggaaaaatgctcaagaagattcaatacatttatgaaatagatactagtggtgaaaataagcttccccaaatgcagccgtctaatttttatttagatggagaagctttagaacgtttttataatgctcaaagaactccatacctcacaggagaagaattttatcagtggaacatcaagccgcgtttatctcccacgaacactgacaagttctataatttgcactatggttggaaaacaactttaaaagaagaagtggagtataggggtgacgaagttattctgtattgtaggacaagatattgttatgataatccgctttctgtatatccgaatcgcattattcgtaccggtgcggatggggttgaacgtactaaggttctgaaacgggtaatggatatggcggatagtgcggatcctgtttttatcaagatgagagaggtcaatttactttcgcctgttgtgaaatcgcttactcttattgatggtaaattgatagatgagactgtgtattgttatcaagatgacaaaggggcaaaggtcggttccatagctccggttgaggtgctgatttatattccagatacaccagaaacttatattttgaatgccgttgatgcacagctatttacttatggagaaagtaactatattactgactcttcttatcaatatactagtcagaaggtttcaaggaagtgggtagaaaccaatggaagaacagaacggaaaggccgtacttatgataattatgggaaattattattagaatgtgatgcaataggagctacggcgagtgataaatacaaaagtatgatagaaagtcaatctatggagaaaataaaaagtgcgttaagagcattgaagtcgcgtcaagcaaatttgccattgctaatagaagaacttaaagaagcgatggatgacgaccagtctcttcaatttctaaattcgtggaacaaatgtttgatcgccaaatttgtagaggaaatattgagaggtgatccggatttaaatcaggcgaaattttactatgaatgtattgtatgtgatgattatgaagtgttgaattggtttaaacaagaatgtgaacggattctagttttttttccgaagtgcactcccttgaaacaatatttaagtatagtagaaacgttaattcactttaatgaacaggagctgtttgattatttgtatttacagcaatacgaaatagagaaaccatcatacaggtttgactattctttgaaattaattccggattcagatacccggaacctacgattgtatatactggacggaaatgcaactgcttcaggaagcatcacccatgcaggaagtgaggttccatataccgttgagagcgtttcttcttctaaattgaaaatatatgatattgacctaagtaaatacacagacataacctctgtaactgccaatactcaaggttcttatatggcattggtccctgaaggagcaaattttaaggccacttcttataatcctgacggtacggtgtatgcccgatttgaccagagcggaaatgtagagtattacacttacgatgctgccggacgagttatcaaagtggaagaccaatatggtaatattttaaaaacgtatgagtacaacaagcttaataactaataaaacaagatgcagaatatgaaaacaatagagatgaaacgaactttgtcaatactctgtctgctgtcgttttcccttttcatgaacgggcagcaagcgacaggttatacgaaaacacgtaattatacggcagagcgaacttatatggatgcgagtagccaaacgggtagcggtgctgcacgaattgtcaatgatattgtctataccgacggttttggccgtaaagaacaggaaatacagataggcggcagtcctggaggtaatgcggatctggtactttcttatacctacaatatgatgggtcaagtagagaaggaataccttccgtatgcaaagaccggcaacaacggtgcctttgataagttttccccggagcgttggagtgtctacggtacgggagaacaggcatatgcttataatctgactcaatatgaggatagtccactgatgcgtgtttcccggaagatgggaccgggcaaggcgtggcatgccagtgataagagtgtccgtgtgacttacggaatgaacagtacaaatgaggtaaagtgctataaagtttcttccagcggctcattgatcgcttcaggattctatggagcggggaaactggaagtcattattgaaacagacgaagatgggcatcggagtaaaacctataccgactccaatgaacggactcttctgactgtatctgtcaacggtgaagatagcttggcaacctactatgtgtacgatgaccgcaattgtctccgttatgtactgcctccagaagccagccatcagctggcggagaccgacacgacggatatctccgtgctgcatagcttagcatacagctatgaatatgataaactgaaccggatgatttccaaacgtctcccgggttgcgctcccatttatatggtttatgaccgtcgtgaccgtctggttttgagccaagacggcaaactccggactgctgatgcaaaaaaatggagttattttctctataactctcatgatcgtgtaatagaaagcggtgaaatgcttttatcggcagagcaaacgtgcggcgaactgcaattgtccgcttgggaaagcgagcattatcttccttcgggaactcgcactccattgcaatatacggtatatgacaattacaaaccaacggagaatgtgactgcccatccgtttgtagcagccgttggctatgatacgtcgtataccctgtatccttcggggttgaccacaagtacgaaaacacgtttgcttggcacagatgactggctgacagagacaatctactacgatgatcgtagccgtgtcattcaaacgctctgtcattatcctgaaaagggactgcgatatagtcatacagcttatgatttcacgggtaatgtcttgagaaagcaggataacattggtacggatatccttgaaaccgtttatacgtacgatgatcgtgcaaggttactaacgaaagccaatacttggaacgggcgttttaccgataaaatcacttatgtatacgatacattggggcgtctgactggcaggaattatggtgataaggtgtctgagagtttatcctataatatccgtggctggctgactggaatcgaaagtcagcacttttctcaaacgttacactatgttgatggagtaggtgtcccctgttataatggcaatatcagtagtatgacctggcattcgggaagtgaggccggattacgtggctataagtttacatatgacggcttttcccgcttgaaagatgctgtttatggtgaaggagaactattgagcaataatacgaaccacttcactgaacaggtaacgggctatgacaagaacggaaacatcctcggtttactccgctacgggcaaaccaatacaatgagctatggcttgattgataatttaaacttggtttacaacggtaaccaattggagtctgtcaacgacaatgctacgggccatgtattcggtaacggtatggaattcaaggatggcgcaagtaaagagatagaatatgaatacgatgcaaatggtaatttgacgaaagatttgaataaaaagatagctgacattcaatacaattgtttaaatttgccggagaaggtgcagtttgaaggtggtaacagtatttcttacctctacgcggctgatggaacaaaactccgtactacgtataagacaggaaatgccactatcataacagactattgtggcaatgcgatctatgaaaatggtgtgttgataaaggtgttgacagaagatggttacattaccgtttcgaataatcaatttcattactttattcaggatcatcaaggtaataatcgtgtggttgtcactcaaaatggtgtggtggaggaagtgaatgattattatccattcggagggttgctttcttcatcattgtctaataatgttcagccttataagtataacggcaaggaactgaacagagataatggtttggattggtatgattatggggcgagaatgtatgatgcttcgttgggaagatggcatgcagtagatccttcaggagaaaaatatcctgctttggggttatatgcttactgtaaaaatagtccaataatacgaattgaccctgatggaaaagatgattatgttgtaaatgcaaatggagcagtttacttgatgcgtaagactgataggatagtagatgttttatatgcaagtggtattaattcctctcaaaaagcgacgcagcctgatccaaattggaaaagtattcgggtgtttgataaatctatgttgcagggattaacggcgagtaaaggggaaaaggggagagactattgggatcgtaagctttacactacgacaaactcggtatataatgctgctaatgtttttttatttgttgcggataatacaagtgtggaatggactcttaagggaggttatatggatggaaagagaacatttatattaggtacaaataataataggaatagagtttcaagtatgtatggattaactaaagtgcaagaggctttatttcctacctttataccaataatagatatccattctcatccttataatccctttgcttcacctgaggatatggataatgctagaatgctgagagatatacgatatggtatttattataaagataatattattaattatactgatcaaaacaatagcacatattctattaaagttaattccatgaatgatttaatgcgatatatatttcaacaattaagatgataatgagaaaaaaagtgattatttctttgatatatgtatcaatagtattgactattcccctggcagttgcctgtcaggggtcaaatgacgatagtatagatcctatacttttggaacatgtaaaatcagtgatagatttctatcctgattgtgggaagactttaaaagtttctcagtttgattctagaaaaacttatgtatatagtatgtggcctaagcaaagtggcttttggtttgatactggtcaaaatggggatgaacttaggttaattttgcctacaaatgctatgagatataaagataaatatattcttttttatctggaaggtaaaaagagactaagtgaaaaggaaattagtagactattaggcatatcgtctcaggatgatatgcctgattctcgcgaaattgatcaacggatttggatatatgtaaaagacaaggaatcgggtaaatctgcttttgagcaaattgaatatggaactaaaatttgggaatatcctaatttacgatattttaatggtggagataaagattccgctgtaattgatattgcaatttatgatataagtgttcatggagaaaaagggaagtctgaaaagttttcttcgcctgataagatttcattaaatatgtctgtctataataaatcggattctagtcttttgataggattgaatcctgatttatatggtagctttataataaaaaacggagaatattcaatgccacttatggcagatgtagaagtcaataggtattttggtgaatttcatgaatattctcccggtttatattccattgctcctcatggaagaatgagtttttatcttagcactgcacaacaacctattaaattgaaagatacgtctccacatgaatatgttcacaaattatatgatttattttacgactccatttgttatgtgcctgcacctactattattcaaatgcctgatactattcaagggattgtttggaataaagaatttacagcatatttcccttttggtagctggtatcatttttttgtaaatgacagtatatacgacatatatcctaatggtgaagtagctggatatgcgatggataagcatcgctataaatggtttgaagaatagtgcgaagcaacaactgaagaagatttttagtgagggtatattagattttgcaatattcctataaatctttaatttatatcataaatgaaaccgataattaggattttattaatcgtactattattagtcctatatagttgtaaaagtatagctttatatgatacttctactgattatgactttaaatttgatttatacagtcaagtaaagatgtattttcgtgcgaatttgaagtaccctactgtgaatgagctttgggactattgttggaaaataacgaatgaagttaatgataacacatttttatcatttgatgactttgataaggcggcatataaaaatgtctcaggtcgagaagagcttttgcagcatttatctttatataaaaaggaaatttcgttccaatttaagaaaggagcaatgtttgttctttggaagaataaaaaatggtttaaaattgagtttgatttaggtgaaatgatagctgataatggttataagtttgtttacttctatgatatgcaaggcaattacagtctggattttgactatgaagaagattttcaaaaaataagaaaggaagtacgtgataaatgcgtaccagatactacattgtggagtgaatttcacacgtgtctcctgagatttgatagaattaaaggatatcagctatattatccctcgaaaaataagattaaggaaaatatttaccttaaagaactaggatgtgctttggataattttcttttaaaccgaaatctgcaaatgattcaatttgttactaatttgcctcaatcgtatttgtataagtaaagtttatgcagtttctgtttgccctgatatggattggctaaataaagtatggcatacctgggctacactggcaagagaaagcggggcgcctatttctatcatcagtgcgggattagggcatacttcagaagaaatgacgagagtatatcttaaagaattcgatcaggagacgctggcgcgggtgaatcgtattgtgaccaatctgttataatatgaaacatgaatttgttcttcaaattttgtaaaactcatatttataacttatatttgtaaacggtatctattttgtaatagagagtatatcaatcgcttaataatagcgatgttgcaaaataagactattttttgcgaatagccattatcaaaaagtacattaatactctccttttgtacgatcccgcagttctccttaaagattatcggttttcgcctgataacggtctattaattgctttggagtacagcgaaaatgctgtttgaagtagcggtataactgagcttgcgactcaaagttgcatacctccattagttgcttgacacatatacccggttctataacttttcccaaaatacgtttctttaattgtttcatcatccattgttttgcggtaattccgaattcttctttgaatttaataaagaagctggttcttcctatatttgacagtgtaattagctcatcaagattatttacttttgaatagttctgcatgacaaaatctctaaactctaattgcctgccaatgatagggtggaaaagtgtagcaatttcttttttattatagaatcccctgagtaggaagaaaaattcacgttctattacattatgtaggtatgtacagttcatttcattcctcaaacagtggactacagtttcaaggaatggcattagtggataacgcatggggatagggctgaaatcatagtcaatattttcacaaatggagctcaaaccttgaaataaaagtttgtcacagttgctttgaggtatatcaaatgccatagccagcatttgggatttgtctgttgcggaaatctttatcattgaagatttaggcaacactaccatttcattgctatgaaacgtgcggttacaaaattggttacagtatactgaaaaatctccttctaaaaaaaataaaagataatttttgtgggtatactcttcctctatgcatttctcagtgtcgaatttaatatatttgaatcctgtatcaatatctgtcatgtaatttttgcatgacaaatgttccctggcgtaatgtaatccgttcggtgattgttcccctctcatatctttccctttttgatggcaacaaagcgattatactccattatgcttcataattgattcagtatggtctaatataatcactttattaccaatgtattataatgaataaaattaaagcctgttatgtatatgcagggtatgaaacataatatatagtatatggttgtacataaccctctatcaatcaattgtatatatacaaaatagacattattactctctattacaaaatagagagtaaagagtataggggaattatgtatagttaatgtgttgtatgttagatgattatgcgactaatttgcgcatagaatagtatggctgtaaaatcaggccggatgattcttgtttaatgaaaagtagaaaacgacagcactcgtttgttggaaaaagagaattatgggatgaattatttttttatagcaatagcatttttagttgcggtatttatggggtggattatcactcctcagattttgctcgtagcttttagaaaacgactgtttgattctgtaggtggtcgcaagacccatagcggtatagtaccacgtttgggaggagttgtgttcgtcccggtgcagtgctttctattagtgctatctatgttttttatgtataaactagaaataacgtcctatcttcaagacccatttatacctttccaatttttattgttgatgataggtttgctcattttgaatatggtcggagtgatagatgatttgattaggattaactatcgtagaaaattcgtagctcaaattgttgcttcttcatttcttccgttatccggactctggattaatgatttgtatggactactcggaataactactttatctccttggattggaatgcctctgacggtgtttgtggcagtctttattattaatgccgttaacctgattgatggaatcgacgggctctgttccggtttggtcggtatgggggctttggtttttggtttcttgtttatttataatgcagcatggttacatgctgtttttgcctttatcaccgcaggggtgctatgtccttttttctattacaatgtgttcggcaaatcgaaaggaagacaacgaatttttatgggggatactggcagtctgacgctggggctctcgatggcttttctggcaatcagctatgcgatgaataatccgttgataaagcctttttccgaaggagcgatagtagtttctttcgctacattgattgtccctctttttgatgtagttcgtgtggtacggatacgttattttcagcataagcctctttttatgcccgaccagaatcatatacatcataagtttctgagagtagggatgtctcattatgtcgcaatgattcttattctggctttggcattgttctttagcttcttcaatattgttgcggtagaatatatcagcaacaacatcgtgatttttatagatatcgtactgtggattgctttccatttatggttggacaggcgagagcttatccgggcaaaacatggggtggcaaataattaaatttaatgatatgaaaatagctattatcggtggttccggattcgtgggaagtcgtttgatcgggctgttacagactgttccgaacattgaactgctcaatattgacaagcagcagagtgaactttatcctcatctgacacaaatagctgatgtgcaggatgtacagaagctgacggagttgctggcaggaactgatcttgtggttttattggctgccgaacataaagacaacgtaactcctgcatcgctttactatacggtgaatgtggaagggacacgtaatacgcttcaggctatggaaagtaatggagttgcccgtttggtattcaccagttctgttgctgtctatggattgaacaaagataatccatcagaattgcatccggccgatccgttcaatgattacggtcgtagtaagtggcaggcggaatgtatgctgcaggagtggtatgatacgcatcgggagtggaacattcatattcttcgtcccacagttatctttggagagggcaacagggggaatgtatataatttgttgcggcagattacttccgggcgatttctgatggtaggagacggtgaaaaccggaagtcgatggcctatgtcggtaacgtagttgcttttatcgcttttctgattgagaataatatggagggatatcatgtattcaattatatcgataagccggatttcacaatgaatgatttggtgtatcatgtcggggaggtgttgaataaacatattcctactacacattacccctattggttaggaatgttgggtggatattgctttgatgctttggctaagatgacgggaagaaaattgtcggtgagttctgttcgtgtgaagaagttctgtgcggtgactcagtttgattctgttaaagtacagtcatcgggttttaagccggctttctcaatggaagaagggttgagacggacgttgcaatacgagtttggttcaggagctgaagaagctattaattgataaactaggctttttcctttttacaggatagaaaagaaggaaaaaagttagatagataagacataaaatttttcaggtagccgtcatgtatgtgactggcgggagcggagcgcgcttggagggtaccttattgtgactttaaatgatagaattggaggagttattatggatgaaaaaaagtgttggttggttgtttgtgtgcagagtaacagggagaagaaaacctacgaacgtctgtcggcattgggatttgaatcttttcttccgttacaggaagaaacacgtcgttggagtgaccgaagcaagaaagtgcagcgggtcgtgattcctatggttgtttttgcccggatagctccttccgaacgtatttctgtgcttcgtcttccctctgtaagccgctttatggtattgcgcggagaaagtgctccggcaatcatcccggatgcacaaatggaacgtttccgctttatgctcgattattcggaagaagcggttgagatgtgttcggagcgtatccagccgggcgaacaggtaaaagttatcaaggggccgttgacaggattaacaggggagctgataacaatggatggaaaaagtaaggtagccgtcaggattaatatgctgggagctgcgatggtagaagtgccggtagggtttgtagagagaatatgatactgttaggtaattactactaagaaaaaacaactgagattacaaaccatgaaggaacagcagattacagtaacttcccctttattaccatctttggaggagttaaatgtttacttgcaggatatatggcaacgcaaatggattactaataatggatattatcatcagatgctggaagccgctttgtgtgaatatctgggtgtaccttatatcagtctgtttaccaacgggactcttcctctaactgcggccttactggcaatgcgtattacaggagaggtaataaccacgcctttcagttttgttgctactacacattcgttgtggttgaatggcatcaaaccggtatttgtagacatagaccctgtaacctgtaatcttgaccctgataagatagaggtggctataactcctaatactacagccattatgccagtgcatgtgtatgggtatccttgtgatactaagagcattcagcaaatagcagataaatacggattgaaggtaatctatgatgctgctcatgcatttggggtggagagagagggagaatctattttgaatgcaggtgatatgtcgacattgagctttcatgcgacgaagacttttaataccattgagggaggtgcattggtacttcacgatgaacatactaaaaagagagttgattacttgaaaaattttggttttgtcggtgaaacggaggtggttattcccggaactaatggcaagctagatgaagtgcgggcagcttacggattactgaacttaaaacaggtagatgctgccattgaagcacgctgccaggctacaactaattatagagaagccttacgtaatgtttccggtatcacatttatggatgatatatccggagtgaagcataattattcttatttccccatatttgtggatgaagaacgatatggtatgagccgtgatgaactctattttaagatgaaggaatataatgtattaggacggcggtatttttatccgctgatcagtactttttctacttatcgtgaattaaagtcagcaaggaaagaaaatttgcctgtagccacaaagatggcggaacaggttatttgtttgccgatgcaccatgcattgagcgaagatgatatggagcgggtgttacggctgataagaaagtagaatatgaaacttggtgtgatgcaaccttactttatgccttatatcggttatttccaattaatgaaagctgtagataagtatgtggtttatgatgatgttaattacattaaaggcggctgggttaaccgtaatcatatactgatcaatggagagaaagaaatgttcactgtgactttgaagaaagcgagtcagaataagttattcaatgaaatagtgataggcgatgattttaagaaacttatgaaaacactgcaactgaactattccaaagctgttaactttgatcagacgatgactctgatgaaaagaatcatttctttctcagataagaggcttgcggcatttatagcaaatagttttcgggaaatattcagttatttgtcaatagatacggagatattgatgtcctcagatattccgaaagataattctctgagaggaaaagataaaatcttgcagatatgtgaaatattgggtgctgatacttattataatgctatcggtgggcagaatctttatgataaaaaggaatttagtgaacatggaattgtactgaattttgtagatacaatcccaaaagtatattctcaattgcgtactaaggaatttgtgccttatttgtcgatgatagatgtattaatgaataataccaaagatgaagtcaatgatttattggattctttttgtgtaagatattgaaattgcttagatatgaaatcttttaatattgtagtgtgtgcgtctggtggtggaggaaattttcgttctttgataaaatatcaatgtgattatggttatcacatttcgttactgatagtagatagagagtgtcctgctattaagatagcaaaggaaaatgggatatcatattccgttttagaaaagaaagttttaggcaagtctttttttgaggagtttgagaagattgtccccatagatacgaatttaattgttttagcaggatttctaccgattatacccaaatggatttgtgaaaagtgggaacgtaaaataataaatattcatccttcactattgccaaaatatggagggaaaggcatgtatggggttaaagtgcaagaagctgttttgaggaatcatgagaagtatgccggctgtaccgttcattatgtggattcggaaatagacactggcgagataatagctcaaaaaaaaatacttgtgatggagaatgagtctgcatgggaattgggaggcagagtttttaatgaagaaataatattacttccgttggctattaaacatatacgtgaagcaatgaaagtgattccttaagattgaatataagtgtattatataatattatacgattttcgatatgacacaatgcccattggttagtatttcttgtctgacctataatcatgctccgtatttacgtcagtgtttggatggttttgtgatgcaaataacatcttttccaatagaaatcttaatttatgatgacgcgtctggagatggtactcagaatattattgaggagtatcagaaaaaatatccggatataataaaaccaatatatcaaactgagaatcaatattcaaaaggtgtgaaggttggttttgtttataattattctcgggctaaaggtgagtatatagcattttgtgagggggatgattattggactgatccttataaattacaaaagcagattgattttttagaatgttactcggattatgttatttgttcacatcgatacagaatatgtttaaaagaggagaaggtgatgaatgatgagatcaaaccgattggcgatttatctgatgggatgtcttttgatttgtctttcttgattcgtggaggttggttatttcaaccattaagtgtcgtataccgaaagtcggcattggatttggatacatactcgaaatatgcaatatatatagacgttgccttgttctatgctattttgaaaaatgggaaaggatattgtatgcctgatgtaatgggagtatatagaatacatgaaaaaggggtatggtctggactcgacttaaatcatcaaaggatcttttctttgaaagcaagagaagctatttatgatgtggagaagacggatgaggctgcaatgttcatcctctcacaattctctcgtccaatgggacggtttcaggttgtgaaagagtgttctatgtttatgagaatcacgaagatattaatttcccattttggtttacgttttgtattgagaatgtggtttgatagactattcttaaataaaaagttgtgcgtgaatgagttttatcagataaaggatttctgcaaaagaaagaagaatggataacattataatagtattaaattcaaatctgttactaaaatgaatatagcattgattattgcagggggatccggcaaccggatgggacaagatattccaaaacagtttattcatgtggataattgtccggttattgtacatacaatgttagctttccaaagacatccggacataactgctgttgctgttgtttgtttaggtggatgggaaactgtgttgtcttcatacgctcatcagtataatgtatcaaagttacgttggatatttgctggggggataaatggtcaggaatcaattagtaacggcatatacggtttaaaaaagaacggtgtcaaaaaggatgatctggttttgattcatgatgcggttcgtccactggtatctcagagtattatatcttccaatatcgcaatttgtaagcagtatggttatgctatcactggtattcagtgtagggaggctattttggaaagtgatgatggcttttgttctgtgacaagtattccgcgtgataaattgataagaacgcagacaccccagacttttcggttagaaaatattataaatgtccatgagcaggcaaaatcaaaaggtatcataaactcagtatcttcttgtactcttttggcggaattgggcggatatgaaatgcatatagttccgggagaggagcgaaatataaagattacgactacggaagacctggagattttcaaggttttgaggcaaacgtcaaaagaagactggctgaaattatgacttattatgacgatatcagaaaagtgcaggatttgcatctgccgtgggaaattctgactgatataaatattctgattgtgggggcctcaggtctgataggaagggcgttggtggatactctgatgcagttacccgataagacgtttcatctatatgcaggtgtacgggatttggtttatgcgcaaagttgtttcatgcgatacaaggatgatgaatctttcaccttgatacaatgtgatgtgacagcattgattccatttgatattgattttcactatattattcatgcagcgagctatgcggggccggccgcctttcataatgatccggtcggggttatgaaagcgaatatattgggagttgacaatctgttttcatacggagagcaacacaatctaagaaggttgttatatgtttcttccggtgaagtgtatggagaggggaatggaattccttttcgcgaagaagacagtggttctctcgattgggcttccttacgcgcatgttaccctgcggcaaaacggactgctgagactttgtgtattgcttatgcagctcaatttcagatagaaacagttatagcacgtccttgccatatttatggacctttttacacttcaaaagatgatcgtgcctatgcgcagtttatacgaaatgtattggcaggtgaaaatataatattgagaagttctggtttgcaacagcgttcctggtgttatgtggttgattgtgtgtttgcacttctttacgttttgctaaaaggaaaaacaaagaatgcttataatatagctgacgtccggtcgaatgtcagtatccgcgaatttgcggaaatgatagcactgaaaagtgaacgagaagtaattttcgatttaccggataataccgggaagaataaacctattatatcacaggcgatatttaatactgagaaaataaataaaataggctggttcccccaatggaagcttgaagaaggcgtttcacatacacttaatactttaatatctgttgatggaacatatatataagttgctgcgctcttttaaatgggactgtgctaaatatctctacaagaatactctgaactttaaagttaagagattaagacgaaagaaaaatataagagttctgtttgctgtggcggagagtgctacctggaaaagcgattgtctttataaagcgatggcggaacatcccagatttactccttctattcttgttttacctgatgaacagaaggaaaaaactctgttgaaagaagaagttgattcatgttttaatttattttgtagaaaagggtatgcttgtacttatccttatcaaaatggaaaactgattaatattcggaagaaattgaaaccggatatcattttctatcaaaaaccttatactttttatcctaagagtcttttgtattataaaaatatgaatgctttattttgttatacaaattatgcttttcatagcttactgacagattgggctaatgataatgaattctttagattgatgtggcagaattattatgaaaatgagtctgctaatgttgatttgaagaaaaagtttgcagggatattctcaaatatcgtagttacgggcttgcctgtaacagacttatttctgactgagaaacatgaagataagtggaaaaaaacagataagagtcgtaaacggattatttgggcaccacatttctcaatatctgatggtggctgtttgaactattcaactttcttatctattgcggaagaactgttagaatttataaagaacactcaattacctgttcagatggcttttaagcctcatcctttgctaaagagtcaactatataattattcttcatgggggaaagagaaaacagacgagtattatgcggcatgggaatttctgccgaatgctcaattggagaccaatgagtatgttgatttgtttatgacttcggatgccatgattcatgattgtggctcttttacgattgaatatcatcatacattgaaacctgtaatgtatctggtcaatggaaaagagcatactgcaacgatgaattcttttgccaaggcagcctatgacctgcattataaggggcagactatccaagatatccggaattttatagaatgtacagtattggaaaactctgattacttactagaaaaaagaaaaaacttttttaagtcgtacttattgccgccccataatcagtctgccacagaaaatataatccatgctattttgggaacaggatattataccgaaaaaaaacagaggtgaatagtgatattcgttcaatgggcatttccggtgtgaaatgggcttctataggacgtttctcttcgcagggaataagttttgtcctgggacttattttggcccgtctgcttttgccttcagactatggtatgttaggaatgcttggagtgtttactgcttttgccggttcatttatagattgtggatttggttctgctttgatacgtaagttggaccgtacagagatagattgttctactgttttttattataatctgggagcgagtttattggtatacatggtcatgtttttgggagctccttttatcgcggacttttataagcagcctttattgactaatgtaaccagaatagcctgtctgacaataccgataggtgctctatgttcagttcatagtaatcttttgtattgtcagttgaggttcagagatatcgcgataggtaatatactggccacttttttttcaggaggtataggattattattagcatataatggttatggagtttgggcattagtatgtcagggaattattgcgtctttggtaaattgttgctatttatggagaatttcctgctggaaaccattgtggatgttttctaccagctcttttaaagaattgtttggttatggcagtaagttaatgttgtctggttggcttaatacaatgtattctcagttgtccccgttgattattggacggttctattcttcctccactttgggttactataccagagcgcaaagttacgtggatttcccgagtagtaatataatgggaattttgcagcaagtcgtttttcctgttctgtcgagattgcagaatgaggatgaacagttaataggaatttatcggaaatatattaaagtttgtgctatttttattttttgtggtatgaccattttggcggcactggctaaacctttgatacttcttttacttacagataagtggttgccatctgtcccgatcatgatacttttatgtttttcttttatgttctcatttgtgaatacaataaatttatctcttttacagattaaaggaagatcggatctatttttgaaactggaggtcgtgaaaaaagctatttctataacaatgattttgttgagtgcatcttggggaattatggcgatgtgctggtctatggttatatatacccaaattgctatttttattaatacatattatactggaaagctatttcatttagggtatcgggaacagctgacagattttctaccttatttttttatggcacttttagctaatatacctacttatatgctgacatatacatctttgtctattgttacacagattttattgggcggcttaatgagtttatctatttatatattactattgaaaataaagcgtgatgatatgtatctgttaatagagcatatgctgttaagttattgtaaaagaaagatggcgagatgatattcggttttattgcaaaaatatataggaaatatcaagaatatattcatcctggtatttatgttacgaggcatggtattctgtacagagaaaaagattgccgatataatgtatatccgttacaaagattaattgttggtaaggtatgggttggaaacattccttcacaggagaaagggcggcttattcttcatgctaactcggaattgatagtaaaagggaattttgatattatcggttcaactgtagtcgtattgccggatgctaaactgattttaggttccgggtatattaatttccattcgaagttacattgttttaatcacatagaaataggagaaaatgttatcatttcagagaatgtaattatccgggattctgataatcaccagataacgggaggaaatagcatgtttgctcctgttataataaaggataatgcatggattggtatgtctgctatcattttaaaaggggtgacggttggtgaaggtgctattgttgcagcaggttctgtcgtgactaaagacgtaccgccgcatactattgtcgcaggagtaccggcaagggtaattaaaaaagatgtttattatacaatatgattattcaatcttgtgagaaacgaaacattagtatctatcatcgtacctgtctataattctgcgcaatatttaaggaagtgcatagatagtattttggcacagtcatatacagaatttgagcttctcttaataaatgatggcagtgaagatcattcgggattgatttgcgatgattatgcgcaaagtgataaccggatacaagtctttcatcaggaaaatgcaggcgtgagtgctgcgagaaacttgggacttgaaaagcatactggtgaacatttcctttttatagattcagatgactacatacaagagaggtatctggaagaactaatgaaatatgcatcatgcgattttgttcagtgttcctgctgttctgaacctgtgggcaatgactatttatttgttgatggaaatttcgaagggagcgatgaaataaagcaatgtctgttgaaatatatttatcctgaatttacggtacctttcggcagattgtataagtcatccatacaaagaaagaataaattgtttttcgatacatatttgtattcaggagaggatactttatgggtaagccaatatttattgtgtgttcactctttgcgagtatcctcatatattggatatatctatgtgcatcatgtaggggaacatttgtcgcaaaaatcgatttcatatgagcatttggaatatacgttacataaactgttaatttcttattctgatcttgaaaaacgatatgatttcgatttaacaggtgttcgttatagtgtcattatttatttttttcataggtatatcgtatatatagcaaacagaaattatacagaaatcaggaaagagttagaaaagtcatgtgctaaccctttgattaagggggtcttttatgataagaaatatctcttgaaagggaaaaaaatgaaattgtttaattggttagtattacatgatatgtatagtgtattggctctttatgtaaaacgatggaagcgatatttatgagatccgagcttttgtctgctttcggattcagattaatttaataaaagagacgtagaatggtgactttaaaagaataccttaattcggatcgtattgattattttccttttggttcaaaaggatatatcatggattggctcttgaggacagaacaatattggattcggagatatatacgtgcacttcgtaaagaggaattttatatgaactataagagaaataagattttgcaatattatttttctcgaaagaagaatcttttgggtatccgtcttgggttctttataaatgcaggttgttttgatattggtttgaagatttatcattatgggtctattattgtaaatcctaaatcccgtataggtaaaaattgtacgattcatggtaattgctgcattggaagtaaaggtacttttccggatgattctcccgttattgggaataatgttgatattggacagaatgcgcaaattctgggtggaatatatattgcagacggagtgaaaattggagcgggagcagttgttacgaaatcggtattagttccgggagtgacggtagtaggggttccggctcgtattgtagagaagtaatgaagatatcagttataacgattaattataataatggtgagcaactggaagctaccattcagtcagtcgtatctaatgtgacagtattaagagagcttttgggagagaaggctgaatacattgtgattgatggtggaagcgttgactgtagtgtttctgtgcttcaaaaatattctgaatatatttcttattggattagtgagaaagataaaggtatttatcatgcaatgaataaaggaatttctgttgcacagggggagtattgttttttccttaattcaggtgataccttttatgaagatgatacactgaaaaaagctcttcttttcttaaaggaggattttgtatgtggaaatgctgttttaaaatatgcgggtggtataaatgaatggagtgccccagaaatagtaaatacattgttttttatgcagcgtttttccgtgtgtcatcagtctttgtttattcgtacggaactacttaaatcacatccttataatgaaacattaatgatagtggccgactatgaacagatgttttatgaaattgctgtgaatcacaggagttataaaaaaatagatttgactatctgttattatggatgtgatggagtctcttctgatcacgagaaagcggatgcagaaaaaagaagtgtaataaatgagtttcggtatttgggatatatagaaccggacgaactatggaacgtggtgagtaaactaaaaattggcacccggaagtatcggcttttattatctttggcaaaatgtctgacaagtagtcctaaatattgggtgagataaatatatttgtatgaaaaagacctctgttccattggtaattgcttttactcctgattattttattccggcagctacatgtctctactccataattacgagtatgcaggcggaaggagagttacatgtcatttgcttattaagcgaggaattgcctgaacggttaaaactaaaaatacaactaataggtgagggacgcacttgttattcttttgtgaatcttcaaggaaaattgcagcatatatatattgatcaaaaatatacggaagcggcttcttatcgcttgttgttaccggatttattgccagaatataaaaaagtcatctatatagattgtgatattattgttcgtaatgatttggttcaactttatcattccattgatttaggaatgaattatctggcagctgtgtttgaagcttctatggattttcagttggaccatctgaaaacaataggatgtaatccgaatgagtatattaattcaggatttctgattatgaatctggaattgatgcggaaggataatatggttgaaaaatttatagaagcttcaaaggttgactatttggagtttccggatcaggatgtccttaatcaactttgtaaggatcgaatattagccttgcctccctattataatagtatcaggactttttatctgccacaatataagaaattctttttgcagaagtatacagaacaggattggttagaggttcaccggcatggtacagtacattataccggggcaaagccttggaatcaattcacggtgcaattccagctttggtggcaatactatgaacaattgccggagattattaaaaaggagtggcaggttgataagaagatttatttcttatctaagctttatagaacatcttgcgggacctttgtggtagataaactccaggcattatatcgcaaaatgaaatattaatgatggagaaaatgaagttaaaagaactagtaaagcagtttattcctatgaattactggaataccaggcgtaaagcatctatcattagacagcaagggaaagtagccgacttttgggctcctattcttaaagcttattataatggtgagatagaaagatactcactgaagcctaaaaaaaagttgggtactcaaaaagtgatttggcaatactggggacagggcattgataaagatgagttacccgaaatcatacaaatatgttttgattcggttgacaggaacaaaaatgattatcaagtgattcgcctgacggatataactatatctgagtatatagacttgccggattttgtttggagaaagcgtgagtatgtacagtttacccgtacattcttttctgatttgcttcgtgtagccttattgagcacttatggtggtgtatggttggatgctactattttactcactggaagtattccggctgtctatgagaagactgatttttttatgtatcagcgctctgatgaagagaagaacaagaagtactgggaaaatgtttatgcttattattttggctgggaacctaattttaaggtgcgaatgttgtctagtatcctttttgctcaaaaagagagcgagattatttcaactctaaccgatcttctgctttatttttggaaaactcaagactcgctgcctgattatttttgttttcagattctatttaatgaattagtagccaactaccggcctgctgaaaattgtccgatagtaaacgattgcattccgcacatcatacaaacaaaaataaatggaacttatgatgatgtgtcatttgaagaagccttggagctaagcaatattcacaaaatgacttattttgatgctgctgcaatgatacgtctcaagatggtgttacgattagcccgaaatgcttgactacagtatgaaacatgcatatttgataatggctcaccacgagtttgaggttttagggaagttggttcaggcccttgatgatgaacgaaatgatatctatattcattttgataaaaaggtgaaaaactatccattgcttaagacaaagtatacaaatttgtatattctgcaaaagcggacagacatccgttgggggcacatttcacagataaaggcggagtatgctctgtttgaggctgcttttatgcaggatcgatatgattattatcatttgctttccggggtacatttgcctctgaagtcccaaagctatattcatcatttttttgaaggtctaaaagataaggaagtattggtgcatgtcccaaactcagattatcagacgcaccttaaaatgcggagatataacttctttacgaagaattttatgcataaggttctttttataagaagaataaatcagctattgtggagagtatgtattcgtattcaaaaagaattgcatatatgtcggaatcggaatcaatcatatactaatgcggctaattgggtgagtataacaggtaaatgtataggttatttattgcagattaaaaaagatgtattgcgaaaatatcgttttactttatgtggggatgagttttttatcccctcggaattgggtaaatcgtatttaaaagatcgtatatactatgatgataaactattgaaatgtgattttgatggtggttccaatcctcgtatatatcatttgggagactatgatgaattaatcagttcgggttgtctgtttgctcggaagtttagctatacggatatgcatattgttgacaaaatattgattcatatcaccgctgatcaagaataatgaaacatgcctatttgattatagctcataatgagtttgaaattctgaaacgactgatacaggctcttgatgatgaacgaaatgatatctatatccattttgaccgaaagctgaatcactatccggattgccggacatcgtatgctaaacttacttttttagaggaacgtatggatgtccgttggggagatataagtgtagtagatgcagaatttgcattgttcgatgaagcttatcgacgtggggaatatagttattatcatttgttatcgggtgttgatatgcctcttaaaacacagaactatattcatcgtttttttgaaaaaaatgcgggaaaagagtttgttggctactatcagggaaatatatccaaagaaattgaccgtaaagtttgtagatggcatttgttccccaaaagttttaaggaaactgaaggcggcttggctgtaacaaagcgtgttttacgtgcaggatgtgtccggctgcagtctttactcgggattcggcggaataaggatattaatttcagaaaaggtactcaatggctaagtattagtaacgagcttgttggttatttgttgcagcagcaaaaagaggtacgaagagtttatacccatactttttgtgcggacgaaatatttgtgcagactatttgctggaattcttcttttcgcgacagagtctacgatatgcacgatgaaggacacggttgtttgcggatgattgggtggaaagataaccagctggaagagtggaaagaaaaagactttgaaatattgatgaattcggaagcattgtttgcccggaaatttagtatacggcatatcgaagttgttgatcaaattctgaatgaaatcagtaaatgaaagaaaaccttgagaaaagacaatcggaagtgattgcagctatgagatttccgttgatggtattgttgctttttgcccatgtgcttcccatgacatcaatccctatagagatgaatttctcagaaatgaatgtatatcatcttttttcagaaggcatatctcataatttgtcccggatacgcaatcctttattctttttcttctctggtttcttcttctttcgcaaactagagaaatggagtcttgatttttatcatcttcaattaaaaaagagagtaataagccttttgcttccttatttattatggaatatacttatgatattggctgtctatataaagaattatgcgtttatttttcttttttcaatggaaccgggggaggaactacaggaagtcaggaataattctttgtatatgttgttttggcatactcctgtgaactatcctttgtggtttttgcgtgatttgatttgtatgtctgcgttgtctccattattctatgctttcttcaagtatctgaaaatatatggattacttattctgctcgctctgtatttatctgtttgggaaacaaatattgcaggactgagtatgacagctattatgtttttcggagcaggttcctatatgggaatttataaaaagaatgttctggcgttttgttcgaagttccggtatgtgacagcaataatcactctcatgtttttatgttgcgctatcatttgtaatgggagggagcttcatgcgtatattgttagaatatatatattgtttggcataataacagctttcaatttgatggactggttaatagataaggaaagttggaagaatctgttttgtaaattatcggctacagtcttttttatttatgcagcccacgaaatatacatcattaactggacaaagggcttcttctcccgtacttctcttgcagactccggaggaggattaatgcttagttatttactaataccttttattactttaggtgtttgtctcggtctctattattttttgaatagaatggcccccaatatgcttgctttgctggttggaggacgaatgaaaactcaaattataagaaacagcaaatgaatattggaaatataactatttcagtgatcattcctgtatacaatgcgtcagtaactttgcctcattgtctggaatccttgcataaacagacttatagaaatttggagcttttatttgtggatgattgtagtacagatgaaagtttgtatatactaacatcttatgcggaacaatttgcagagatcgattttacaatcagaatattacaacatgaacgaaaccgaggtgtagcggcggcacgtaatacggccctgaagtgtgctaccggagattatatttattatgtagatgcggatgattctatagaaccgcacacattggaatgtctggtcaatgaaatcaatcacaaaggactggatatagtggggcacgagtggtacttgactttcaattccaatgcacgctatatgaagcagccggcatatactacttccgttgaggcattacgaaaaatgatgggtggggtaatgcggtggaatttatggctttttctggttcgtcgttctctttatgtagagaatgatattcgttttacagaaggtttgaatatgggtgaagatatgatggtgatgatgaaattgtttatctgtgccgggaaggttggcattgttcatcgtcctttttaccattatagacaaagtaatccggaatcactgacaaagatttattcacaagagcatataatacaagtagcaaataacgtatatgaggtggaaaaatatgtaaatgcttccgcatatgcggattcattaatagagtttattccttttcttaagttgaatataaagttgcctcttcttataacagatgataaatcgcattatgaacaatggctggaatgttttcctgaggcaaactgctatgtcatgaataacaaacttcttcctttaagaacacggattatacagtggatggcggtaaaacgatatttcattttgttgaggttatattatcggacggtatttaagctggtttatggtattatttataaataatatagttggagaatggtgcgtttattgactatgttattgatatcaatggttgtgagtggctattattttccattcagtttttctgtcttaccgcaactgaacactaaaatggcattagcgatgttaggtattgctttggtagcttatcagggatttcaaaaacatcggattactttttcgagagatttgctgggtgctattgtctttgcttttattttctcatttatctgctttgttgctgctgactataatcatacagatgattattcttatgtcacttacttcgtgtccttttttacgtggttgggaggtgcatatgtggtttgttatgttattcgcgcatttcacggtaaggcgacattaaatttgctcatagcctattcggcttttgtatgcgtgtctcagtgtatattggcaattttaatcgatagattctcggcattccgggctttggtagatacctatatctctcaagggcaagagttttttcaggaagtgggaagattgtatggtatcggtgcggcattggatcctgccggtgtaaggttttctattgtgcttcttttgatagtctatcttctctgtgaggatgagggtgtaaagcaggttaggtggaaaacttttgcctgtttattcgcttttttcgtgattgctgttatcggtaatatgatttctcgtactacatctgtcggattattcctgggaatagtatatttaatatgctctacaggtattttccgtttggtaatcaagggtcgttatatcaggctttattctattttaggaggaatgttaatcgtatttacgatgttatcggtctatttatataataacgatccttttttctacaagaatatcagatttgcctttgaagctttctttaactgggtggaaacgggagaactaagaacggattcaacggacaaattaaatacaatgatgtgggtttggccggaagatgttaaaagttggataattggcacaggcttgtttgctaattttgtgtatagcacagatattggctattgccgttttattttgtattgcggtttaattggcttcggaacttttgttttgttttttgtgtataatgcctgtgtgtttgcatggaagttcccttctttccggcttttttctttcgttcttttatcattgagtttcattatctggatgaaagtagctactgatctattttttatttatgctttattttattgtctggactggaaaatggaaccagttcttatagaagaatgaaaatcgtttactgtatagccggaacctacaattccggaggaatggaacgggtattggcaaataaagccaattatctggtcagtcatggatatgaagttgttattattactacagatcaacgtgaaaagcaatcctttttcgaactggaccaacgtatcaactgctgtgacttgagaatcaactatgaagaaaataacgggaagtcatttcttaataagttagccaattatcctttcaaacagtggaaacatcggaagaggctgacggcttgtctgaaacaacttaaggctgacattgtggtttctatgttctgcaatgatgcttcttttctatggaagattgatgatggcagtaagaaagtacttgaaattcatttttcccgttataagcgtttgcaatatggacgtaagggagtctggaaaattgcagaccgatggagaagccggatggatgaaagaaccgtgaggaaatacgatcgttttgtagtactgactgccgaggataaggcatattggggaaatctgtccaatatgatagtgatccccaatgcattgagtcattctacaacagaacttcatctttctccccttacagcccgaaaagtgattgcaatagggcgatatgggtatcagaaagggtttgactatttgatagaagcatgggaaattattcattgtgcccaacctgcttggacactggatataattggtgatggagaatggacggaccgtctgcaacgacaaattaagagaaaaaggctgaatcattgtgtctttttgaaaccaccgaccggacagatagaagaagagtaccgacaagcctctttgctggtactgtcttctcgttatgaggggttgcctatggtattattagaagcacagtcgttcggattacccattgtttcttttgcctgtaaatgtggccctggagatgtaataactgatggtaaaaatggttttttggtatcggtaggaaatcttccgatgttagccgacaggataatgagactgatggaagatgaaggtttgcgtaaacgtatgggaatgaatgcgtaccataattcaaaaacattctcggaggaacgaattatgcaatgttggattgatatgttcgataagttagtatcacaaagatgagtagcaagcgaaagacgattgttgtctcagcggttagtttacgtaagggaggtacattaacgatattgcaagattgcttatgttatctttctgctttggcagccgacggcaattatcgggttattgcattggtacataaaagagaattggctgactatccgcacattgaatatattgaaatgccggacgttatcaaagggtggggacgacgtttgtggtgtgaatatgtgacaatgtataaattgtcacaaaaaataatgcctgtatatttatggctgtctcttcatgatgcgactccaagggtggtggctgaacgtcgggttgtctattgccagacttctttccctttttataaatggagttggagggattttctgtttgactataagattgttctatttgctttatttacccgttggatttatcggatcaatgtgcatcggaatacttacctgattgtacaacaggaatggttacgttccggattgagccggatgttgggggtaaaaaaagaaaagttcatagtagctcctccggaacgtaaagagaatgatgtgattgcagaaatagtagaactttcctgttttacattcttttatgctgccacaccagattgccataagaattttgagctgctatgcgacgctgcttctctgttggaacaagagcttggaaaaggaaggttcaaagtggtcttgactattagcggacaagaaaataaatatgcacagtggttatataaaaagttcggttcggtaagttcgatagagttcgcaggattcatgagcagagaaaaactttttggttattatcatgcagttgattgccttgtgtttccgtcaaaggtggaaacatggggattacccgtatctgaatttatggcaacgggtaagccgatgcttctagccgaccttccgtatgctcacgagactgccgctggaagtatgcaaactgcattttttaaattgtcggacccggttcaattaatgaatctgatgaaacggttatgtgaagatgactttacttttctaacgagtatcggtacttctgataaacgtttctcattcgcttcatcctggcgggaattattcgattctatattaaattaattttttcagtccggtactatatatgcggtaagtgacaaactaaacttatgaagagtaagaaatagatattttattaaaaatgagaatactacaaataggcaaattctatccgataaggggagggatagagaaagtgatgtatgacatcacaatgggactgtcacagagacaggtttattgtgatatgctatgcgcctcggccgaaaaacagaaacctgagaatctattattgaatgattatgcacgtatactatgtgtgtccacctggaaaaaagtggcggctactatgttatctccggctatgattttccggttgcgtaaaataaacaaagaatatgatatcattcatatccatcatccggatccaatggcatgtctggcattattcctgtctggttacaaaggtccggtagtcctgcactggcatagtgatatactgaaacagaaaatgttgttgaagctctattcaccattacaaaactggttgcttcgaagagcaaaagtaattgttggcaccacgcccgtttatgtacaggaatctccgtttttggaaaacatacagcgcaaagttatcagtgttcctatcggaatagatgaaatgaagccggttcccgggcgggtggcgcaaataaaagaaagatatgccggaaagaaaatcatattctctttgggacgtctggtagagtacaaaggctatgaatatctgataaaggcttctcaaaagttgaatgacgactatattatattgataggtggcaaaggtccccttcaagagtatttgcaatccttgattgatgaactgggagtgaggaaaaaagtaaaactgctgggatttatagatgacaaagatctgccggattatttcggtgcctgtgatctgttttgtttaagttcgatttggaaaacggaggcttttggtattgtacagattgaagcaatgtcctgtggaaagcctgtgattgctatgaatatcccggagtccggagtcagttgggtgaatataaacaggttctccggaattaacgtaaaacctgaagatgcagatgcattggcagaggcgattactgctgttctgacagatgaatgcctgtatgaagagttagcaagaggagcgcgaagacgttatgagactatgtttactaaagagctaatgacagaactatgtctgaatctttattcgggagtattggacagttctgaaaccgattatccggccaacaaaaaagaatgaattccgaaaagttgtaatcaaagaaaaacaagctatatgaaaagaaatgtgtatgtgggagtacttttgacagcgttattgatgacttcttgcatcaatacgaaaagaatcgtttatctggaggatatgaaagaatcgttatcttatccgatgaatgcccaaccggaaatgaagattcaacgggatgaccggcttagtattgttgtcagttcacggaatcccgaactgacggttcctttcaatatatcgaccggaggaaactttcaggtaacttccagtggagatgtagctaccggtaccgatatgcaaaaacgtgaaaaagggtatatggtagatttgaatggatatatcgaattcccggttttaggaaaactgaaagtggtagatttatcatgtaagcaagtagctgagctaattaaaaagcggctgattgatgaaaatctgatcaatgatcctttggtatttatcgatattttgaatataaagattactgtgatgggagaagttgaaagtcctcaggttttaaagatagatgatagccggattactttgctcgaagcaatcacccgaacaggcggagtgacttccaatgctcttttggacagggtagcggtcattcgcgaagaagggaacgaacgcagaatgtatatgcatgatatccgttcgtcggacattttctactctccttgttattatttacagcagaatgacatggtatatgtacatcctaagtttgcagaagccaatacgaaggaaagacgtacattaagtttttattcgttcggtctgactcttttaagtttgattactacaataactgtcttattaaaataatagccgattactgcatatggaaaaacaaaagaagatggctttgacagaggaggaaaagtctattaatatcgttgacctttttatatacctgatagctcattggaaatggtttgtcctttctattctgctgtttgggggatatttctggtatagctactgtgagaccccgtttgtatatagccgcacggcaatagtaatgattaaaacaccagccaattcgcggtcggcaatgcagttgaataacgctgatttcataggccaagtcaatgtggcgagtgaaattctgcaattcaagtcgaaggaattgatgcggaaagtgatagatcgtctgcatgcggatgtcagttacatggtgcgtgatggcctgcgtcccagagaactctatacggactctcctgtacgggttgcctttttggaggctgggctggatgaagtgtgttctttgtctgtcatacctaaaaataaacagcaggtggagttggcagacttttcgctcgatgaactcgaacaacgaaagactgtgaatctgaatgacactgttgatacgccattaggaaaactgattgtatttgctgctgaaaattatagtgaatcctattttgacagaccaatcaaggtgaccagtaagtcccgggaagggatggtcgctttctggctctctaatctgacaatcagacagatgagtggtgatgccgctttgctgagtatgactatgaatgacctgtcacctacacgggcagccgatattcttgatatgttgattaccgtttataacgaagaagccataaaggataagaaccgtatttctgtgaatacggcagaatttatcaaagagcgtcttcagattattgagcatgaattagggagtgtggaaactgatattgaggatctgaaaagagcgaataacggcgttgatattaatacagttgcaggtatgtatatacaagatagcaggcaatatgaatcatcaatcaaggaactggatactcagcttcagttggtatcatttattaaacagtatttgcaggattcaaacaaggatgacgaactgatccccagtaatatcggactgtctgatcttagtattgagagccagatttctcgctataatgaaacgttgctgcgtcgtaaccgtttggtaagtggcagtagcagcaataatcctgttgtccaggagttgaatcgtatcatgcagacgatgaaacaaaatatttatatggcagtagataatttatctaaaagcttgagactgaagaaacaagattatatgcgtcaggagagccatgtgcgtcaaaaagtgcaagccgttcctgggaagcaaagggaaatgttatctatagaacggcaacagaaagtaaaggaatctttgtacatattcctactgaataaacgggaggagaacgctttaagccaggcgatggtggataataatgcaagaatccttgatccggtttcgggaagtaacttgccgatctctcccaataaatataaaaagatgatgctcggagtaggatgtggtatcattgtaccttctgtcattctgttattgattttaatgctggacacccgggtgcataatagaaaagaagttgaggctgttgtcagtgctccattccttgcggatatcccacagacagccaaagcgtctgtggatgcacacgaagttgtagtgcgtgcacggggacttgatccgttgtccgaagcttttcgtatccttcgcaccaatttagggtttatgctgtcacaggcgcaagaccataaaattatcacattgacttcttttaatataggggctggcaaaacttttgtttctgttaatctggctgccagtttggtgcagaccaaaaagaaagttcttatacttgatctggaccttagaaaagggaaaatgagtgagatggcgcatagcaagcatgtcaaaggagtagcacactatttatccaatccatccattgttgtagacgatcttattctgcgggatgctttcggtgaagggcttgatttaattcctattggagtcattgcgcctaatcctacagaattgttgttgagtaggcgactggatgaattaatggatagactcagagaattatatgactatatcattgtagataatgtgccgataggattagtggcagatgcttccattgtcaatcgtatttcggacttgacattgtttattgtgcgtgtcggaaaaatcgaccggcggcaactgcctgagttggaacgattgtatcaggaacacaaactcactaatatggcggttgttctcaatggtacgaaaaaaggcagtagcggctatggttatggttacggttatggacagggttatggttataagaatgcggaaaagaagaagggattatttgggcggaagaaaaagaaatcccggaaataatgctatcatttctctctgacagatgttccgtaatgtctatattgaaaattaaacggtcttttaatctgattctgtataaagtgagaaggttatcggattttatgtgaataattaactggaaaaaaagccccaactttgcaattggaacttggtatattgaattttaatgaaaagaatcacttatgagaaaagtaattgttctatcggccttgttgctgataacaggaatgagtgtttatgcacaagaggactactctaaatctttaaaaacgacaactacaatcgtagaaaatgctgataaatataaagtagaaaccaatcgcttttggagcaactggtttgtaactgccggtggtggcggactgatctttttcggtgaccataatatgcagatgaaatttggcgaccgtctgagtccggcacttgacatcggttttggaaagtggtttacccccggcatcggtatacgcttcatgtatagcggactgactatcaaaggtgctacacagaacggcagtcactctaccggaaaagtgtacgatgcttcacaatggctggacgaacagaaattcgactttatgaatattcatggagacgtgctgttcaatgcctcgaatctgctttgtggttataatgaaaaacgtttttggtctgtaactccctatgtcggtttaggctggatactcacatgggaaagtccgcgtgcacgtaacttcaatgccagtatcggtctgatcaactcgtttcgtctgagttctgcgttcgacttgaatctggatgtgcgtggtactgcgacaaaggatgagtttgacggtgaacgtggcgggcgtaaagaagaaggattattgtccgtaacagtaggagttacttataaattcccacggcgtacatgggggcgcagcactgtcaagaccattacctttagtgatgaagaactacgtctgatgcgcgaacaactgaaagcgatgaatgacgagaacaatcgtctgaaagacgaattagcaacttccaataaggttacggaaagagtggtggaaacgaatatcctctctgctccttatctggtcactttccagatatcaaggtatgctcttagcaatgaagctcgtgtaaatatcggatttcaggctaagataatgaaggaaaacaagaatgctgtctatacgattatcggttatgccgataagggtacagggactaaggagtttaaccagtttttgagcaaggctcgtgcggaagcagtctacaactgtctggtcaatgagttcggagtaccggcatcgcaactgaaaataacttatgaaggtggtgtggacaatatgttctatgatgatccgagagtaagccgtgcagtgataacggtgattaaataaacccttttacataaatatggatgagatgagataaaaaacacacttataaaacaatttgtaattagttgaaagatgcataagcatctataaatctcatggggcataatttcggtaacggagtgcctcgaaaaatagtcatctgtgaagatggtcgctattgcttgtttgaaagcatctttttccagtgggggagaggtgctttctcatggcttagtccgttaaacacttgacaaacgccttttattgttgtatatttgtagttccaaacctgaactgaataatataagaacgataaataaaatgagaaaattagtatggaatcatcggctgcggtggtataatatagtaacaaatagtgcttatctctctgacgtatagccgaggataggatgctccgatataggaaaaggctgcgaactttatgagttttgcagccttttttgtattataaattcaatcctgattctacaaattcctattttaaagtttataataaacgaggggtacgtttataataaacgatcacagtatttattataaacccggttgccgtttatgcattgaactgtaattattttcgtatgcttggaagtctataattggaatgaaataaaatgctggtaattatagtgaacatgtatggcgtctgtgatctgtcagatatgaagtaaaatgaaagaacaacggctttctttctccaagtttgtgctctattctttttctaagggaggtgaagacggtgatcatttttgatattcagcagtctggattcttgcagaggacagacggttattcctctaaatgcaaaagttttaatttccttccatctatttaagagtatttaccttatctttgttaccgaaataaaatatgatcatgaggaacacattgtatattctattggcattggttactttatttctgcaaaaggtaagcggagaagagaattctagttattattttactcacataaatggagataacgggctttcgtcgagtaacgtgaaagcgattatccaggatagctacggttttatgtggttcgggacgaagaatggtctcaatcgttttgacggtacttccatcctgcggatgaactgcgaagatcatcagttaaagaaaggcaataataacatttctgctttgtatgaggatgccaatcgcacactttgggtgggtacggacaggggtgtctatttgtatcatccggcttctgatgtattcacccatataaaccaaaagacaaaagagggtaaaacaatggataactgggtgtcggccatcgtaggcgatacacagggtaatatatgggttattatccccgatcagggaatattccgttataaagacaacgaattatatttttatgaaatcagcaataggagacaatttaagcaggaatcccccaattgtatttgcgtccgtgaaaatggggaagtctggattggcttctggggattaggaatctgtcgttataatccgcagaaagattcgtttgaacagatagtggaggatagggacggacgtccgttggtggggaagaatattaattctatctgcgagtatggcgattggctgataatggctgccaacgaaggggaattgataaaatataatacgaaaacccatgtcttggaagatataaaagtagcaggagccgataatacgttctatactacggtagcctatatgaaaggtaaaatctggctgggaaccttcaatggactgtacgtcattgatgagaagaagaatgaagtcgtttcgttgaaggaagacctgatgcgttcgttcagcctgtcggataagatgatttattcgatgtgtcaggatagtgaaggagggatatggatcgggacattgtttggcggggtgaactacttacccaaccggaatctgcaattcgataagttcgtacccggaagttccggaaattcactgaataccaaacgtatccgtgaactggcggaagatgtgaaaggcaatatctggatcggtacggaagatgcgggaatcagtgtgttgaatgtagagaacggtgtgataaggcaggtaaaggataataaatccggaaatcatctggttactttggcagtagtcccttttcaggatcagatatattgcggactgttcaaggccggacttgacgttattcaggttccgggatacactgtcaggcattatactccgtcggaactgaagatcggagaaggcagcgtatatgttttccatatagacaggaaaggacgtaaatggctgggaacaggctggggactgtatgttgccgaggctggttcatttaattttgtgaatgtcaaggagaccggatacaactggattttcgatctgtgcgaagcgaaagacggttctgtctggattgccacgatgggaagtggcgtgtggagatattcgcctcagaccgactcctataaaaagtatgaaagcaaggaaaatgaacccgatgggttgagttcaaactcagtcagctccgttatgcaggacagtaaaggacgtgtctggttttctaccgaccggggcggaatctgctattacaatgaagaaaaggataactttgtcacctattcaataaaggaaggattgcccgacgatgttgcctacaagattctggaagatgaagaaggaaatctatggtttgggacgaaccgcggactcgttcgctttcatcccgacaagaatgatatacgtgtttttacgacaaaagacgggctgttggggaatcagttcaattataaatcggctttgaaggcgcgcaatggcaaattctattttgggggcatagacggactggtcgctttcgacccgagagaagcgaagacggatgattttgtgccgcctatttatatctccaaattcagtatatataataaggaggtgacagtgcacacagccgactcacctttgaaggaatgtatcacgcataccgatcgtatcgtattgaattatgatgagtcgaatattagtttcgacgtggcgttactcagctattctaccgctgaggctaaccaatattactatcggatggctccgatcgacaaggactggattaaagccgctaccaatcagaatatatcgtatgcgaaattgcctccgggacaatatacctttcaagtaaaggcaacgagcaacgataatggagggcaatttgtcgaacgctccttgtctattgaaatactaccgccctggtggttctccccttgggcatacgtattctattttatctggcttgtctgcgtggtggtatcctggttcttctggtataaacaccggaaggaaaaggaaatggaagagcgtcagaaactgttcgagatagagaaagaaaaagagttgtatgagtctaaggtcaatttttttacggagattgcccacgaagtgcgtactccgcttactttgatcaatggtccgctggagacgttgcaggagatggaaattgccgaccctaagattcagaagaatctgtcggtgattacgcaaaacaccaatcgcctgctgacactgacggggcagttgcttgattttcagaagataggcgctcataaatttgagatgacgatggaatgtgtggatattacgtcgctgcttcgtgaaacagttgcacgctttgaacctactatatccaagaagaacaaagaactggctcttcatattccggaagaatccatagaagcggtcgttgataaggaggctattactaagattctgagtaaccttttgaataacgctttaaaatatgcccgtcattctatttgcgtggaattgcagagagagacggaggcattccttgtgcgggtgaccagtgacggtgataagataccggcggagattagccagcagatattcgaaccgttctatcaggcagcgaaaaaagactccgcctcatttggtgtcggcataggacttccgttggcacgttcgttggcatctcttcatagaggcaagctatatctggactcagagcatgaagataattctttcgttctttctgttcctctggtcgaaaataccttgcggtctttgcccaagttggaagagataacggtcgaggcagataccctgggtgaaggggtgccggtagaggcggaaatgaaaagttacgttttgttgctggtagaagataatgagaccatgctggaatttatgtccgaacgcctgctggaggtttttacggtggaaacggcaaaaaatggacaggaagcactggaagtgttgaggagcagacggattgatctggtcatcagcgatatcatgatgcccgttatgaacgggtgggagttgtgtaaggagataaagtcggatatggacctgagccatattcccgtcatcttcctgacagccaagaatgatatcgacagcaagatcaacggcttgaagataggtgcggaagcctatgtagagaaaccgttctctttcaactacctcaaaacgcagatcgtatccttgctgtataaccgtcagaaagaacgcgaagcattctccaagcgtccgttcttcccgacgaataagatgcagatgaataaggtggatgaagagtttatgaataaagtgattcgtaccatcgaggaaaatatcatagataccaatctgaacgtagagcatcttgccgagattctgggcatgagtcgttccagtctgctgcggaaaataaagatgctttccaatctgtctcctgtggacttcatccgtttaatccgattgaggaaggctgccgaactgattcatgaaggtaaatacctgattggagatatctgctttatggtaggtatcaactcaccgtcctatttcagcaagcttttcctgaaacagtttggcatgacacctaaagatttcgagaaacaaagtcaggcagacaaagaaaagatagacatgccttcgtgaccgtccgggtgcactataacaaatgatgcataaaaatgaaacatctgcggaaaatatgcttcagatgtagtctgctgctgcaaaaatggtattttttgcagtaatttttaatattccacctatatatatactcctacttttgccaccgttccggataaggagagataatccctttcggcgaacggattgatttatccttaaaagtgaactctaatactaacttaaaattctgatacatggaaaaaatcaggcttatctatttgactttgattttattttgctgctgccagctgtcggcacagaataagacagttaccggacaggtaacggcagcaggttccgaagaaccgattatcggtgcgagtgtagtggtgaggggtacttccaatggtactatcaccgatgttgatggaaacttttctctttcagtccctgtagggaaagaacttcagatttcttatatcgggtatattactcaatatgtaagggttcctaagaataataaggtggctgtagtgttggaagaagacagtaaggctctcgatgaagtcgtggtggtagctttcggtacacaaaagaaagaaagtatgatcagctccatcgagacgatcaaacccgcagagctgaaagtaccgtccagtaacctgacgactgctcttgcaggtcgtatgtccggtgtgattgcctatcagcgtagtggagagccgggaaaagataacgcggacttctttatcagaggtgtcacgaccttcggatacaaaaaagacccgttgattctgattgacggtatcgaaacgactactactgagctggcacgtctgcaaccggacgatattgccgcattctctattctgaaagatgctactgctacggcattatacggtgcccgtggtgccaatggtgttattcaggtggccacgaaggaaggtaaggaaggagcgactaaagtatctattcgtgtagagaactcattctcttccaataccaagaatgtggaactggccgatccgatcacctttatgcagcttgccaatgaagcggtcaggaccagaaacccgctggctcctctggcatattcgcgtgagaagatagacaacacgatcaaaggtacgaatccgtatgtctatcctgccaatgactggagaaaacttttagtaaaagacatgaccgccaatcagcgtgttaacatgaatgtcagcggtggtggtaagctggcaagatactatattgcagcttctttttccaaagataacggaaacctgaagagtaattcatccaatggtttcgataataacattaatttgcgtagttatcaattacgttctaatataaacatcaatctgacaaagacgacagaagctgttgtgcgtctgtcaggtagctttgacgactatcgcggacctttggacggaggagatgtgatgtataagaagatagtccgttccaatcctgtattgtttcccgcctattacccgtcggatgcactgcctacagcgaagcacttgctgtatggtaacgctatccgtgagacggaggcgaactatacaaatccttacgccgaactgacgaaaggatataaagactactcccgttctacaatggatgcgcagtttgagttaaagcaagatttatcctttatcacgaaagggttgaatgtccgtggattgtataatacttcccgctactcttatttcgatgttaaccgctcgctcaatccttattattataatataagttcgtatgataagaagacgaatcaatataatatcggtctgctgaacgagaagtccaatccgacagactatctgggatatagcgaaggctggaaagacatacagtctaccacctatatagaagcggctatgcagtataatcgtagtttcgatattcacgaagtcagtggcttgctggtatatcagcagcgcgaaaagatcaatgcgaacagcggttctttgcagaagtctctgccttaccgaaatcagggtttgtccggccgtttcacttatagttacgacagccgttatatggcagagctgaacttcggttacaacggttccgagcgcttctataaaaacgaacgttggggattcttccccgcagccggcttggcttgggtaatctctaatgagaaattctggcgtccgatgaacaaggtgatccctaaattgaaactgaaagcaacctacggtctggtaggtaatgatgcgattggagacgagaatgaccgtttcttctatctctccgaggtagatccgaatgatgcaggtaagggatattggtttggaaccaactttgacgaaggaaaaccgggagtgacggtgaagcgttacgataaccgccttatcacttgggaacgggcgaaaaaggcaaactacggtttggagcttactttgtttgatgccttgaatattcagctggactactttacagagcatcgtacgaacattctgatggacagagcttctatcccggccgatatggggctggctgccaaagtacgtgccaatgttggtgaagcgaaagcaaacggagtagacttgtcagtggattataataagttcttccgcaatgggtattggttgcaggcacacggtaactttacctatgcgcacagcgaatttctgaaatatgaagaacccgcctataacgagaaatacagaagccatatcggtcaatcgctgaaccaatggtacggtcttatcgccgaacgtctctttattgatgaatacgatgtgcagaactccccgaaacagacctttggcgaatatggagccggtgacatcaaatatcgggatgtgaatggtgacggacagattaccgatgccgacatggttccgctgggatatcctacagtacccgaaattgtctacggattcggtttctcattcggtaaccagcgatttgatatttcggctttcttccaaggttcggcacgttcttccttctggatagatgcgaaggcaacttctccgttccagcacatcaatcctacggatgacgatccttatcatcaggatattcctttattgaaagcttatgccaacgaccactggtcggaaagtaaccgtaacctgtatgctatgtggccccgtctgagtacgacagtgattgaaaataacgtgagaaccagttcttggtttatgcgtaacggtgcattcttgcggttgaaaacgctggaagtaggctacacactgccggaaagctggacgaagaaggcctatatatcatccgcacgtgtttattgcagcggaaacaatctgctcctccttagcggatttaaactatgggacatcgaaatgggaggttccggactgggatatcctattcagagagtcatcaatctgggtgtacaaattaacttctaaaatctaggaaagcatgaaaaatagaatgatataccaaatgaagaataaggtcagaaacctgacatacttccttctgttgattggaggaacagcattgacacaatcctgcagctatctggatgtagtgcccgataagataggaacgattgataactcgtttacaaaccgcaacgaggcggaaaagtatctgaatacttgttactcatacattccgggcaatgacagcccatacaataatgtcgctctgatgggtgcggacgaactctggagttattaccctcttactccgtacaacgactttggcccttggaagattgcactgggacgtcagaatgtcaatgaccctttatgtaacatgtggtatgtatattaccgtggcatccgtgattgcaacatctttctggagaacgtatcagacatgagcaaagtaggagatttgactccttccatgcggaagagatggcttgccgaagtgaaatttctgaaagcatattatcatttctgtctgttcagaatgtacggtcctatcgtgattgctgatgacaatctcccgatttcggctactccggaagaagtgagaaagaaacgtgagccggtagataaggtagtgcagtacattgtagatttgctggacgaatgtctggaagatcttccgagagtgatttccaacaaaggtagtgagttgggtcgtgtgacgcagatcgcaaacctgactctgaaagccagactgctggtaacagctgccagtccgttgttcaatggcaataaggattacacaaactatgtggataaggatggagaacatttgtttaactccaccgaagacccgactaagtgggacgctgccattgccgcatgcgaagccgccattgaagccagtcaggacccggaattaggattagaattatactcctacaaaagcaacctgatcctgtcggatgaaaccaaatgccagcttagcattcgcaacagcgtaacggaaaagtggaatacagaactgatctggggactttcttcacgttcggacgcacacttgcaaagtctttgtatgacccgtgtcggagcttaccccaacaatatgtggggaggacaggaaatgctgaaccctacaatggaagctacgaatctgtactacacaaagaacggtgtcccaatggacgaagataaaacatggaattatgccgaccgtttcaaagtaaagatgcacaccaacgagcaaccatacgaactggcatcttattatgaaacaatacagatgaactttgacagagaacctcgcttctatgccaatatcggttttgacggttgcacctggtatcagtataactgtccatcagacagtgaaaaagacatctggacagcgaagaaccgcgccggacaagcacagggaaaactggggactaacagctatacaaccaccggatactggaccaaaaaactggtcagtgtcacttatgaagttacccagagtggctatacgaccgaaagattcccttggccggaaatgcgccttactgacttatacttactctatgccgaagcgctgaatgagaaagacgatgtcaacaaccgtgaactggctatcagctacctggatcagatcagagcacgtgccggtctgaaaggaatcaaggaatcatgggacacttactccaagtatcccaacagatacaagacacaggaaggacttcgtgagattatccagcgtgagcgtgctatcgaactgatgttcgaaggcagccgtttctgggatctccgtcgatggaagacagccaataaggtattgaacgagaagatccacggatggaactttgaaggtgaaactcccgcagagtactattctcagagaaccctgtatacattaaagtttatcgctccgcgtgattatttctggccgattcatcagaatgacctggtagtcaacccgaaattggttcagaaccccggatggtaatgtatgtctcattttaaaatcagcagaatatgatatcacgtaaatttacaatatgggcttgcggcttgcttttcgttttcggtagttgcgcagaagatatggtaaagcccattgaaaacgacaaagacgctcctggcactgttcaggacgtaaaaacagaaagccttccaggagctgtgaaattcacttatacacttccttccgatccggatttgctgtatgtgttggccaagtatactaataaaacagggaaagtcatggagttccgttcctcgttttacacgaactctgttacggtagaaggttttggcgatacggatacttataaagtagaactgtacactgtagaccgtagcgagaaccgttctcagcctcagatagtggaagtcgttccgctgactcctcctatcctgtcctgctacgagtcgttatcgatggtttctgactttggcggcatgaccttcgagatggacaataagttcaagtccgatcttgctatctacgtctgtacgcccgatgaattaggtgatatggtgctggccgaaacattctactcggcacgtgaagagatcgtttattccgtcagagggtatgatgcagttccccgtcgtttcggcatcttcctgcaggataaatatgggaatgagacagatacgctgttcaccgagctgactccgatctacgaaagggaattggataagacgaagttcagggaaatgtatttgcagaacgattcccgcgtagattcgtacgatggcaagatggaatatgtatggaacggaagaatctccaaagatggtgacagtggtggcgtaggacttcacaccggaacaggcacgaaagacggtccggcagtatttaccttcgaccttggcgtactggctaaactgagccgctttgcactgtgggctattcaagacgagaagcacttctataacgacatgagcccgagacgctacgaagtatggggatgcgctacggaacctaaccccgatggtagctgggatcagtgggtgaaactattggatatggagaatgtgaagccttccggttcgcctatcggtatcctgacggaagatgatatcgaagccgcgaaaataggagatcaggcaaatgttcctctggatatgccgcgtgtacgctatatccgtatcaaatgtctgaagaattggtctaacaattacaacatctgtttcacggaactcaccttctgggggaatgataacgaagaataattcaatgagtgttaaccgactgattaaagcagaaagaatatgaaacaaattatcaaacatacgccctatctgatgtcactactgatgctgttggggattacatcttgcacaaagatggacgaatatctgaaatatacggatggaaaggaaattctttatacgggtattcctgattctatcgccatgtactccggctacaaccgggtggtcttccgcggagtactggcatccgaccctaaaatagccaagataaagatatactggaacttgaaacaggactctctggaacaggatatccagagagaagggaatgataatgtgctgattataccgattcctctggaagaagggacctataatttcgaaatgcatacctatgataaagacggattgcatccttcggttcctttcaaccttaccggaacgtcatatggtgactcctacaaagacggactggtcaaccgcttggtgaagaaggtagaaaagatagaagatgatgtaacgatcgactggtcgccggcagaaccgacagctctttatacgatggtgcattacactgataattcgggaaaagtacaggaactgaagatcgaaaacagcgaagaagaaaccgtcctaaaggactacaagagtatgaccaagtttgatgtgcagacttacttcctgccggatgaaatgtcaattgatacctttaaaacggcagttgtctcttacggagtcagtgaagacattaccgacttgtatctggagaactacaaacgtccgtttgaaggaagggataagaatgcggataataaatggggaatactcgttgactgggacttcactcccaatatcctgaatcagagtaatggaaaaggcggttggtccgaagactggggcaattattccatccatctggaatcgaaagactgggatggagaaggaatcacgaatggtaaggtctatcaaagttttgaacttccggctggaaattatcaattggagtgtgaactcgaagggggcagtaacggaatgaacggatatctggcagccagccgcggcagcgtattgccggacattgaccgattgaaagaagaagcattgggatatagccagtacggtgactccaatatgggaggaaagcataccctgaccttctctttggcggaacctgctactgtttcggtaggctgggtagtcaccttcggatcgtctacctggatgaaagtgctctatatcaagctgatgaatatagcggatatagccgaataattcggttcttataagtgcttggaatagtggatatacaccatatatgccctgcatgcagggcatatagatccaacgcgcaggacatatatacgctacgagttggacatatagatccaacgcgcaggacatatatacgctacgagttggacatatagatccaacaaccaggatatatatgcgctgcaaacgacataattacgataagaaaataaataataatactataatcaataatgtgtatgaagtttataacgaaaaaaggtaaatcgctgggtatcggacttgcaatggttggttcattgttggtatcttctttgcaagcaggccccgtttatctgcatagtggtgaatcgattgtttcctggaagttaaagccggaggcggaagtcggaacaaatgttccggctctgctgaacgcaggttatgacacatcatcatgggtggacgctgttgtaccgggcactgcttttacttcttacgtaacggcaggactggaaaaggaccctaactttggggataacattcacaatgtagaccgtgcaaagtatgatcgcagtttctggtatcgtacagagtttaaagtgcctgccgactttgataaagcgctgacatggctcaacttcaacggagtgaaccgtaaagcggaaatctacctgaacggacacttgctggggatactcgatggatttatgcacagaggacggttcaatatcacggaaatagtgaagaaagatcagccgaacgtactggcagtattggttcacatgccgcaaaccccgttggcaaactacggcagtcctacttacttgtcgagtggtggctgggactggatgccttatgtgccgggactgaatatgggtatcacggataaggtttatctcagcaacaccggtacggcaacgatcatcgatccttggattcgtacagacttaccgttacccagccgcacacgcgctgatctgtcggtggcactggaagtgaaaaacagttctgacaaaccatctaaagttgtggtgaacggtacgatcacccccggtgatgtgaagttcactagagaagtagacattaatccgggggcgacttcggaagtgaagttcgacaaacggtattatccgcaactggtgatcaactcgccgaaactgtggtggcccaacggatatggtgagcccaacctgtatacctgtaaactggaagtatccgtagatgggaaagtctccgaaactaaagacgtcaccttcggtatcaaagaatatagctatgacacaaacaacaacaccctgcatctgcacatcaacggtgtacctgtatttgtgaaaggagctaactggggaatgtcggaatacatgctgagatgtcgtggtgaagagtatgacaccaagctacgtttccatcacgaaatgaatttcaacatgattcgtaactggcttggctctactaccgatgacgagttttacgaaatgtgtgataaatatggtctgatggtatgggatgacttctggattaactctaatcccaatcttccttacgacttgaatgcattcaataacaatatgatagagaaaatcaagcgtgtccgtaatcatccgtctctggccgtatggtgtggtgataatgagtcgaacccgcagcccccgctggaaggctggatggcagagaatatcaaaacctttgatggtggcgaccgttatttccaaccgaactcacatgccggcaacctgacaggtagcggtccttggggagcattcgaccctcgattctatttcactgaatatcctgacggactggaaggtgatccggaacgtggctggggattccgtacggaaataggtacggctgtagttcctactttcgaaagtttcaagaagtttatgccggagaaagattggtggccccgtaataagatgtgggatttgcactacttcggtcagtctgctttcaatgccgcaccggacagatatgacgcttctcttgccaaaggttttggcgccccctctggaatcgaggactattgccgtaaagcgcagcttatcaatatcgaatcgaacaaagctatgtatgaaggctggctggaccgtatgtgggacgacgcttccggtatcatgacctggatggggcaatcggcttacccctctatggtatggcagacttatgattactattatgatcttacaggcgcttactggggaacgaagtccgcgtgcgaaccgttgcatatcctctggaatccggtgacggacgcagtgaaggtggccaatactaccgcagaaaactatcaggatttgaaagcggaagtgacagtttacaatatggacggaaaagcggttccggcttatagcaaatcctctgtcgttcattcagcgtccaatagcacgctggagtgttttaccatcgactttaataaggaaagaccgaacctgggattgaatcagaaagtagttgtttcctctacttccgaaggcgacccgtcaatggctgtggatggaaagaaagatacccgttggtcaagtgcctaccgtgataacgagtggatatatgttgatttgggcaaggtacagcccgttggcggtgtccgtcttgactgggaagcatcttatggaaaggaatacaagattcaggtatcgaatgacgctcagcagtgggaagaggcttacagcacgaaaaatggaatcggtggtgtggagctgatcactttccctgaaaaggatgcacgttatgtacgtatgttcgggttcaagagaggctggtggtacggatattctctgtggagcttcgatgtgctgggaggaaccggtaagagcgaaggtttgagcgatgtacatttcatccgtctgaaactgacggataagaacggtaaactgatttcggaaaataactactggagaggaaatgaccgcagagacttcactgctctgaaccaacttccgaaggccgaactgaaagtttcttccaaaatggaacagaagggagagaaggcggaaatccgtgcaacaatcggactgcctaagtctgccaagagtgtagcttttgccgtacacgtacaggctgtacgcacagttgacggtgaacgtattcttccggctatcatgaatgataattattttacgctgatgccgggtgaaaataaagagattactattaactttgacaagtctttgttgaaaggcggttcttacaaattactggttacaccttataataactaacttgctatgacactgagaaatataacttgtgctgtaactttatgcctgcttaccctttcgggacaggctgtcggaaagacggaggtaccaccttataagaataaatcactttccatcgagaagcgtgtagacgacctgatgggacggatgacactgcgtgaaaaggttctgcaattgcagaaccggggcgcaggccgtctggacgagatagaccgtatattcaacggtgagagttatggctgtacccacgaaatgggtacgactgccgccgagtgtgctgccatgtacaaagaactgcaacagtacatgctgacgaaaacaaggctcggaatccccattattacttctgtcgaaggcattcagggaatcctgcaaaataattgtacgctgtttccgcacgctttggcgcaggggagtaccttcaatcctgctctgatccagcgcatgaccgaagctgcgggagaggaagccaaagtaattggtatccatcagattctctcgcccgtactggacattgcccgtgaacttcgctggggacgtgtagaagagacctttggtgaagacccttaccttatttccgaaatgggtattgcctttatcaatggatatcagaaaaaccgcatcacctgtatgccgaagcattttgtagcgcacggcactccctccggcggattgaactgtgcgcaggtcagcggtggtgaacgggaactgagaagcttgtatctctatccgttccgtcgtgtcatcaaggagacgaatccgttggcattgatgacttgttatagtgcttatgatggagtagccatcacaggttctccttattacatgacagatattcttcgtggtgaactcggtttcaaggggtatgtttattccgactggggatcggtggaccgccttaaaacctttcatgctatcacgcccgaaaccgatgaggccggacgcctggcattggaagccggggtagacttgaacatcgactctgcttatgataacttcgaacggatggtacaggaaggtcgtctggatataaaatacattgaccttgccgttcgccgtatcctgacggttaagtttcagttggggctgtttgatgcgccttatggcgatccaaaagcagtgagtaaagttgtccgcagtgcggagaaagtagctttggctaaggaaatagctgacgagagcgctattctgcttgagaataagaatcagattcttcctttggatttggctaagtataagtcaatagccgtagtaggtccgaacagcaatcagacgatatacggagattatgcctggactaccagagataccaaagaaggtgtcactttgcttcagggattaaaagaggtattaggaaataaagtaacggttcgccatgccgaaggatgtgactggtggagtagtaaaaaggataagatagcggaagcggtggaagccgttcgcggcagtgatctggcaatcgttgccgtcggaacacgcagtacctatctgggcagaagtccgaaatattccactaccggagaagggttcgacctctcttcgctggaacttcccggagtacaggaagaactgttgcaggaaatcaagaaaaccggaaaaccgatggttgtcgtattgatagccggcaaaccattggctatgccttgggtaaaagagaatgccgacgcactgttggtacaatggtacggcggcgaacagcagggacgttcgttggctgatatcctcgtagggaaggtcaatccgtcgggacgactgaatgtatctttcccgcgtagtacaggcaatactccttgcttctacaatcattttatcacagatcgtaatgaaccgttcgaccagccgggcagtcccgaagaaccgaaaggacattatatctttgacgcccccgacccgttatggagctttggcagcggacagagttacactacttttgaatatgtggattgcgcgttgagtgattctgtattgaccgacaaggatcaactgacggtaacggtaaaagtgaaaaacaccggcaagatggatggcaaagaggtagtgcaactgtatgtacgcgaccgcttcagttccgtggctactcctatccgccagctgaaagcattcaggaaagacctgatcaaagccggtgcaacaaacactttcacactgaaacttcccatctcggagctggcactttggaatgcccgtatgcaggaagtggtggaaccgggagagtttgagattcagataggaagtgccgctgacaatatccacttcacgaaggtgataactgtgaagggaaaatgacaccgaacgacaaaaaacgaagaggtctgtttctgacaatagggttgtttatactgccgtttcagctggtcattaatcatttctatggcgggattacggtgaaatctttcatcgtgatactggttggctggctgatcagtataggcatgttgtttctggtctttcgttcggcatgtagaagatgaagcttgagtatatacttaaaacaatgattatgaatacaaaaatcctttgcgtatggatagcgcttctgacttgtcagatagcgggtgcacaaacaaagaatgtgacatggggagatcagggaaatggcacgtatatcaatccgatattgaatgcggactattccgatccggatgtcatcagggtaggcgataagtattatatggtaaactcggactttcattatatgggtatgccggtgctggaatccgatgatatgattaactggaagattatcagtcaggtgtaccggcgtctggattttccggactgggatacgaacggaaattatggaggaggctcatgggccccctctatccgtcatcatgacgggaagttctggatttacttctgtactccccgtgaagggctgatgatgagtacggctaccgatcctcacggcccttggtcacctttgcattgtgtgaaacggattggcggatgggaagacccttgcccgatatgggatgacaatggtcaggcttatctgggacggagccagttgggagccggacctatcatcttgcataagatgagtgccgacgggaggactttggaagatgacggacacgtgatctataccggtccggtggcagaaggtaccaagtttcacaagcgggacggatattactatatcagtattcccgaaggcggagtaggtgagggatggcagacaattctgcgttcgaaaaacatctacggtccatacgagaagaaagtggtactggaaaaaggttctaccaatgtcaacggacctcatcaaggtgcactggtagatactcccgaaggtgagtggtggttctatcacttccagttgacggaaccgctgggaagagtcgtgcatctgcaacctgcacattggaaagacggatggcccgtgattggggtggacatcgatatgaacggcataggcgaaccggtaaaagtctggacaaagccgaataccggaaagaaagtgcccgtaaacttcccgcagggaggcgattcttttgattcgcccgagctgaacttgcagtggcagttcaaccataatccttctgacgccgactggaatctgacggaacgaaaaggatggttactgttgaaagctctgaaagcggatcatcttcgggcatcacgcaatatgctgacacagaagtgtatcggatacgaggggacggttacgacagaaatggatatgagttcttgggccgagggacaacgtgccggactattctgtataggcaatttgttcaatggcattggaatactcaaagagaatggcaagaactatctgtatctggagaataatggtagtgtggagaaagtaaagccggtaagcggtaagaagatttatttcagagtaacgatgaatgcacgtaccaaccagcatcagttgtactatagcacggacaataagaactttactccctgcggagagccttattcgctgagattcggtgactggaaaggtgcccgtgtcggtctgtactcatacaatacgcttcgtgacggaggaaatgctttcttcaactggttcacttacgactttaactgattcagcccgttcacaactttaactgattcaactatctatcattttaattgattcagctatctacaactttaacgacttgatttataaaccttattaaatgtatatcatgaaagtgaaaaccctgtttttaatctgtttccttagtatcacctgtcttctgaacgcggcggacaagcctgtcattcagattcatacggacaacagtagtctgattttccgcatagccgacaacgggcggctataccagagctatttgggcaaaaagctgagccatgagaccgatatttcccatcttccgcatgggacggaagcctatatcacccacggtatggaagactactttgaacctgccattcatatccttcacaatgacggcaatccgtcacttctgttgaagtatgtctctcatgagacgaaagcggtgtcgcaaggagttaacgaaaccattatcaccttgggagatgataaatatccggttacggtaaagctgcattacgtcacttatcctgccgaggatatcattaaaacctatacggaaatcagccataaggagaagaagcccgtagtgcttcaccaatatgcctctagtatgcttcatctgaatcgtgctaagtattatctgactgaatttgcgggtgactgggcacacgaagccaatatctccgaccagccgttggagtttggtaagaaagtactcgataccaaactgggcgcccgtgccaatatgtttacccctccgttcttccagctttctctggaccagctggctacggagaattgtggtgaagtgctggtaggtacattgggatggaccggcaatttccgctttactttcgaagtggacaacaagaacgaattgcgtatcatttcgggcatcaacccttatgcttctgaatattatcttccggcaggtgtcgtgttccgtacccccgatttctattttacctatagtgcaaatggtaagggcaaagctagccgtaatttccacgattgggcacgccgttatcagttgaaggacggagatgaaacccgtatgaccctgttaaataactgggaagcgacttatttcgattttaatgaggagaaactgataggactgattggcgatgccgcaggtctcggagtggatatgttcttgctggacgacggctggtttgccaataaatatccgcgcagcagcgatcatcaaggcttgggagactgggatgaaacggcagataaactgcccaacggtatcgggcgtctggtcgaagaagctacaaagaagggtatcaagttcggtctgtggatagaaccggaaatggtgaatccgaagagtgagctttatgagaaacataaagactgggtcatccatcttcccaatcgggatgaatattacttccgtaatcagttggtacttgacctgagcaatccgaaagtgcaggacttcgtatttggagtagtagatgatttgatgactaaatatcccggtattgctttcttcaaatgggattgcaatagcccgatcactaatatctactcttcttatctgaaggagaagcagtcgcacttgtacatcgactatgttcgcggtctgtataatgtactggaacgtattaaaacgaagtaccctgatctgccgatgatgctttgttcgggcggtagcgggcgtatcgactatgaagcgctcagatacttcaccgagttctggccgagtgataacacggaccctatcgaacgtctgtttatccaatggggatactctcagcttttcccggcaaaaactctttgtgcacatgtcactacatggaatcatgatgcaagtatcaaattccgtacagacgtagcaatgatgggcaaacttggttttgatatcaaattgtcggacctcaatgataatgagaagaagttctgccgtgatgcggtcaccaactacaatcatcttaaaccggtggtgctcgaaggagacatgtatcggctggtatctccttatagcggcaaccatacttccacccaatatgtggggaaagataagaagggagctgttgtctttgcattcgatatttacccccgttatggcgagaaactgttgcctgtccgtctgcaaggactggacgccgaccgccaatatcgggtgaaggaaattaatctgatgccgggcgctaattcttctctgcaaggaaacggtgagttattctctggtgaatatctgatgacggtaggactgaatatatttacaggtcagcgtctgaacagcagagttatagaagtagttgctgaatgacaggaccgatggaaatccgttaatcacttgacaaacgccttttattgttgtatatttgtagttccaaacctgaactgaataatataagaacgataaataaaatgagaaaattagtgtggaatcattggctgcggtggtataatatagtaacaaatagtgcttatctctctgacgtatagccgaggataggatgctccgatataggaaaaggctgcgaactttatgagttttgcagccttttttgtattataaattcaatcctgattctacaaattcctattttaaagtttataataaacgagggggacgtttataataaacgatcacagtatttattataaatccggttgccgtttatgcagtattctgttgctatttttgtatagttagaatgtgcgttctccgattatagctaattacgataattatagttgacaagggttgcgggtaatctaaccatacaaagctcttgaataccttacgttacttatgcgtgaagttccagtataaaccggcatcccttggtgtagcttgtgtccaatgtcagactgccattcattttggtggcgatgagtgagcagataggtaatcccaagccatcacctgtagtcaggtctttgacctgggtgaagggtttgaagagattttcctgttgttctgccgggatacctgttcccgtatcggttatgatgaactgatgggtgtgcgcgccacgtttcttgaagtcgaggctgatacgtccttgctccgtatagaaagcggcatttttcagcaagtagagcaggatacgttccagctgttctttattcgtttttacttggagtttgggggcgtttacagaaggggtgacgtccggcttcataaattctttagccttctccatgacgctttcgcagaaagtacccgcattgacttctcccatttcataaggttcggtcagtgagttctccaaagaggaaagctcttgaatattgtcgctgaattgctttaaggctgctacttgtgcctgcatctgctctgcataccttggtgcttgggcggaaagctctttggcggaagtccctaaagtgttcagagtcggctccatttgtgaggatatattccggatgaactttgttttcagctcgttgtgctcattggctatgaccacgctctttttgagtttgcggttgccggtgataaatttcagcagtaagatggcaagtacaatgattgtggctacaaggatagctacaagcgtacaaagtcctatgatgatgtattgcttggcggatagtgtgctgtctttgtcctgtatggtctggaggctttcgtcatattttcgtttcaggacattcagctcatcctgggcagtcagggcttttacagagtcggtccatacaatatagctttcgtacgtacgttccatcaacggggcattgttggctttgcgggcgatgccgataagagtcttgtagcagtcgctcactttatcgtagtccttcttttccttgtattggctgatgagtttgcggaaacaggcgtctccttgtgtattctgattgaaagtatagtaatagttggctttcgtatagagcagcacttccattaaagaatcatttttggcgagactggcaatctcttccaatttgtccagctggttttttgcctgtgcaggattcttcagtgaaatgtacatctgcaaccgttccttgctgatgggaaagcgtaagtcataaaagactttgttttgcttctgttcgcctgtccaaatgagttgttccatattacggcataattcgaaaccttctttgtagaagttttctctgacatatagagcattggcttgaataccacattctatagcttgtggatagttctctcgcacggcaaatgcttcatacgctttcttaaacagataacgggctttgatgtaatctttctgcttcaggctgcttaaagcctgttcttttagttctgtggctttatcctgaggtgcttgtgcataaactgacagataaaaacaaaatgtgattaaaagagttacaatggacgttttcatactattgcttttattatttactacaaatgtaaaacaaatatatgaataaaaaagatatagccagtaaaaaaaatatcgctgtttatacgaagctaagcgggaacaatatgtagaatacttaaaaaatcatttgtcgaatgtataaatagttctgtggcgatactcttcccccggcatgagcaggcaggacggaaaatgcggatgcgaaggggtatccggaaagtattgtgtctccagacatacaccgatatccggtgtgggagcgagatagccggcggtatataataagacaccgggtaagtcagtcctgacagtcagccttctgccggagaaagggtcggataatacggcggctgtcaataacgtgtcggacgactcttctttcaggatatagcaatgattgtatcccttgttccagtgcaactgctcgttatcgtcgtaaagatgtgctccgatgctgcgactggtgctgaaatcaaacggactgtctttgacatcctgtgcctgtccggtaggaataaattgtgaggttgtctctaatattcgtgcagcaggtatcatgagctcatgctccgttatttttcgtttgttgccggacaggttgaagtaagcatgattggtgagattcagataagtagggcggtctgtggttccgtgatagctgattgtcagttcgttggtttccgtgaattgatattccacttccgcctgtacatttcccggatatcctccttccatgtccggagagtggagaaggaaacggatgccggaatctgtccgtttccattgccatatcttcttgtgaaagccggatagtccgccgtgattggtgttctctccgtcgtttttctccagcagataggtagtgccttcgatagaaaaggatgcctgatgaatgcggttggcaaaccggccgacagtggctcccatataataggtgtctttgagatatccttctgcatggtcatatcccagcagaatgttttcaaagacgtcgtatcggttcggcatattggccgaaacccaggtggctcccaggtttgtaagctcgatggaggctccggtagcgttggtcaaccggaacagatagatggaatctcccgatggagtacatccccaatgtgtaattgtaaactgcatgatctgcttattttatatgaatcttttgctttgcaaaggaaagcaaaatcaaagaatcagaaaatagagaaaatcagtttaaagatggacaattataagaattgtgtctgtgtttttctatcgaaaggaaatggggatgtgctctctcaacggaatgccggaaggtgtgttaaaaatcggtagtatcttaaatctcctccttcgggaaggaggagtacccgcagggggaggtggtaggtgaatacgcaattctttcattcatagtaaattatagacaaccccattttagttactattgacttttgaaacacgctctggctttctgatagttatttcttcattttagcgagtagaatgacgttgttgccttcttcatccagtgaatttatcaatgtttgtgcacgtttctttgcctctgccggaatatctttccgggttatttctttttccagtgtttcttttagctgggcaggttccatgttggcaacataataaccattgccgaatgaaggccatatctgcatctttttcgttcccaggaaatcattgtacaggcggaagtagctgccatgcagtgttttcttatctatgatatacttggcaggcttgctgccgctccaagtgttttctgatacttgtatcggcacggaaacgtctccgataaagtgacgcgggtattcggaatagccatgccaggggattttctccttgttcggatattccacggtgaatctggcttcgagtcgattttgggctgcgttatagtggtacagactgtccgttcgtggggcaggcatgatcaccattaacataacgccgtaatcattagtattattatccataaatacttcgttgctaaagtcgcgcggaacggtcagatgtcccggtgcgataaagttcttgcgtttacctttgaaatcttgtgtccacacgacagccggccagccttcgaaaggcagagttgtcagagtgacttccgacttttccgtatctactctgaatttgcctttgggcacgcgcatacataaaggaatgggaggctgaggattgccttgtaaatcgaatacgagcagcttgtcactctgccagggcagtatgtagatacggttgtgggcttcgtccaactggtcggcgtatgtgtttccatattcgttgggcccttgtccgtaggcaccgatagtggtgatgaatttgccgtcgcgggtaaaaagtttgtagggagtctgtttgttattgctcaccaggatgtatttttctcccactgtggtgcgtatccagcctcctactagtgcttcgtcccggttgtctagtttgacaacttgaagttcttctgtcaaatagctgagtggaatgtctactgtgtctttcaaagcctttaaattacatgagactagtgtgccggtaggtgtcgtgactcgttttgctacaataggggagagtgccagtgggtcggtctttgtttcactgttgtatacaaaagcaacaattgcaagtagacaactagcacataaacttaaaataataattctgttcttcatacggttctgtatttggttagtactgtttttctgattatcactgaggcaaaagtagaccgaagtgagcagaaaaacaaaaaaacaggcggacaaaaaggtacgatgtgactagatgtatgttgttgattattaataatataatatatatatgcgtttgttttcaggcggacaaagacttcaactaccctggggcgacagctaaaaaactttgagaaaactgtctaaacttatattctcatcagtaattcccagcttatcagtctttatccgatatttccgtttggtaatggcagctttgctcacacaatagatatcagataaatcctgtatgttgacattgattttgacgaggcagcagaagccgatttctttatctcccaactgcggataagcctgtcgtaaccgaacgacaaaattgtcgaacgcatcgttcactactgaagtgacttctgcccattctgcatctgtcactactatcttgtgactggtgcccggttcgtcctgattgttgttggcatggagtgagggcaacttatggaagaatggcattctccggaaaagcgcttcacggagttcagtctctttattccttagccggatttctttctcccgtagtccacttacttcggcttctttgtacagtaactggttttcccgcagcagtcgcttctttttctctctctgataaaagaaaaatgcgatgaatccgatactcagcagagctgtaacgattcccagcatccatagttccctttgctgctgttgcagatgcagctggtataattcattctgtaatttgagttggttgaattctctttcccgtatccctgtactgatattgtttagtatattgtcccttattgtgctttccttctgcttggtataaaagacttgttccggatattctttttcattgatcagattgaataagcgtgcattggcttccatggcaataaagctggaagatgagattgcggcttgccgatagtaatattgggcggagtcaatctgattcaaggcggcatgggttcttccgcatagcagcagatagtgtggtacttcatttcttccgcggcgttggctcgataattgttgaagatatatgactgcttgctggaaatcctttctttgcagactggtgttcaacagactttccagcgcataataattcaaagactggtatttgggcgaatccataagttctttcattagctgcagatagctttgggtgtatctgtcatgatcttgcattttgtttataatttgcagatatagctggctggtagaaaaatagaaaagtgtatctttcatcttaagagccagttgtctgctgctgtctgccatcaccaatgcctgcggataatcctgctttctgctgtatgctgcccttcgtagcccgtacagccttgtttttagcgtatcatttagctggtatcttttcaggatttgttcgctcatcagtaatgtggaatcgggcagattacgatataaataggaggcgctttgctcaatgcgtgcccgtacatactgggtttgctgctcgttttgtttatattgccggatggcgatctgcaataatgaatcatcaggtgttcctgttttccacagagttgccttgtagagcaacaggtaataatctccctgatcattgagaggtaatttgtcgggttcttctatttgttgcaggtagaaaaagatactgtcggttgatacattctccatctgcatcgctttttccagaagatgagatggggcaggttgacaactactcagcatgataagccatccgatgagtagaaatagggggtaatatgggttgtcgtgtttattcatatactagattctatcttgcgaaaatagtattttatatgagacaaagactttttctttatggtattttattgatttactgtcaagcgcttttatcccgcccagttttctctgtctagattgcgataactgatggcttcagccaaatgggagggctgtatcagttccgcaccctcaaggtcggcaatggtacgtgccacctttaatatacggtcgtatgcgcgtgcggaaagattgaggcgttccattgcatttcgcagcagggaaagtcctttgtcatccggccgagcgtaaatggataataacttgctgctcatctgtgcattgcagtagataccgggatgatcggcatagcgctgttcctgtatacggcgtgcctgaatgactctgttccgaataacactgcttgcttctccctgtcgctgatcggatatcttgtcgaacggaacaggaacaatctctatctgaatatcaatacggtccagcaacggaccggatatcttgttcagatacttttgtacctgaccaggactgcatacacatgccttggtcggatgattatagtatccgcaagggcatggattcatggatgcaatgagcatcagattggcgggataactgattgtgctctttatgcgggagatggtaatctgccggtcttccagtggctggcgcaggacttctaatacccctctgttgaattcgggtaattcgtccaaaaataaaactccgttatgcgccaggcttatttctcccggttggggaaaacttccgcctcccaccattgcaacttgcgatatcgtatgatggggatcacggaatggccgttgggaaatcagtgaagagccccggtttagttttcctgcaacggaatgtattttggtcgtttccaggctttcacccagggagaggggaggaaggatggaaggtaaccgtttagccatcattgatttaccactgccgggagcgccgatcatgatgagattatgtcctccggcggcagcaacttccaacgcccttttcacattctcctgtccttttacgtctgcaaagtccaggtcaaaggctgtttgctgttgataaaactcttcccgcgtgttgacaacggtctgttccagctcccgctcaccattgaagaactggataacttctttgatattactgacgccatataccttcagttgattgacaactgctgcttcccgcgcattctgttgaggaataatgagtccctcaaagttttcttcacgggctttgatagcaataggcagtgctcctttgataggctgaatgctcccgtcaagactaagttctcccatcatcagatagcgggataacttttcggaagatatggtttcgctggcacccagcaagccgatggcaagaggcaaatcataagccgagccttctttgcggatatcggccggtgccatatttacaaccaggttactggtcggcattttatagccattgacttgcagtgcggagataatacgttggtgactttccttcactgcggaatccggaagaccgacgagatagaacatacagccacgtgagctgttgacttcgattgtgatgagtgttgcatcaatcccttgaacagccgctccgaaaactttaattagcacgtttgattaccgtttatttcttctgtttgtttttcttttctttttctgtcgcttcctcaacgatgttttctattttctttttcagctcttctccccgaaggttcttagctaaaatctttccgtccgacgagagaagtatgttggcaggtattttatagatagaatattgcttggctacttcagaattgagtccgccgaaatcgcatacctgttcccagtccagcgtatcgcgtttgatggcgtctttccattgctgcttgtctacatccagtgagatgccgagcattcctatatatttgttcttcttatactttttgtagatttctcttagctcgctgttgctctgcttctgagagatgctgtcgttccaggaagcccaaaagttgatcagcaggcttttctgcttgaaggcgtctgatgaacgggtaatcttttctcctttcgcattgggcaggctgaagaaaggtgcatatttgccaatctccgatttttctgcctgagtgattgtttcattcaaacgttcgatatacggtttgtcctgtaatacacctgtcattacttcaactagctttttaattttactgaagtcaggcgtttctttctgaacgaagtatttgtctaataagtaaaggcttacataggaggagtgatgttgcagtatgaactcttccgccatttcttcggcagtgtttgctttctctacagttattcttttatccactgtttcttcgctggctttttctgaaggatcagccggatcttccagtgctttttggaagtctgtaaactcctcattgtatatatttccactgatagtcaggaaattcaggttgatcgtatctccttttattttgatcttgttacctttatcaagaaagacaggatattcaatccggttcttgagtaacagataggcagaagtgatcgtatctacgctggtagtgtaggagaacttatcgttttctacataaatggtgtctatccggtcgtacagttcgtccatgccgtacaaataaagtgtatctgttccgagtcctttgatctctccggtgatggttgtctcattggagcccttcttgcatccgaccagacagataatgatgaggattaaaatactactctttttcattgctttgatttcttttctgcgaaagtacggttttttacagataaaaaaaagaattgcccgtcatttgtaatgacgagcaattctcaatatctaaaatagagtggtaattctcttatttgatgatgctcatgaagtctgcatttgtgaagaacttagagaattccaagtctgttgcagctttcttagccaacgcaggttctttagcaacagcgctcttcaagctgctggttaccatagaagaattgttagttctagcacctagaactgccatcaggtagtctgtgtaagcatctggtttttctacgcctgccagtgtgtttttagctttgttgtagtccttagcaaggatctgagccaaagcagcactgttagtcttagcgtcaccgaatgagttaactgctctttcgtactggccttgagcgatgtacaggttacccatagattcgccaagttcttttgtacctgcagctttaccgaagtaagcttcagcagcagctttgtcacccttgatcaaagagatcaaacctaagttcatgtttacttcaggagcagcgtttacgctggcagctttcttcaggtaagattcagctttgtcaacatttccagcttgataagcaagcttaccaaggttgttgtatgcgcggtaatcgttagggaactgttttgttgcctgagtatagatagcttcctgttttgcaggatcgttagtcagtgtagcagcatacagcaattcttcgatgttcagttcagaaggattagaagaagcaagcttagtgatttcttcgtcagacttaccgatgatctcgtagttcaaagtcaaacgagaacgacgcagttgaggaaggatatcgtcagccaggttcttgtatacagaagagatgttcttgatttcttgttctctctgtgcaggatcctgatacatagataatacgcgaaggatcagttctttatcctggatgttagatttagaaaccagttcctggaaaccttcccagtcctgtgcagtatatttagcgtcaaccggagcgtcgatcttagctttcttcaagtctttgttcaacatcttggtagtgttgctttcgcggttttctgccagagttgtattcaggcttacaccaccatcaggagaagcataagcagaaacttcgatgttgctgatcttcttgttggcagcttcgtttatgttagcaacttccttgttgaattctttagcagttttcaactcgcttgaacggatgttagcctgttggatcaagaacatgatgttagcatcgtgtttttccttgatgatacgttggaaagcatcttcgcccagagccgggttagcgctgcccaatgtgttatttaccaattcagaagtagagattacaccatcagctactttcacagcggggataacgacttcctttttaccaactttagctttgaattcaagccacagttcagattttgccatttcaggaacatagtcgaaagatgttttcatcgtatagctaccacctactttgtaagagatagtctgatcgtttccttctactttttctccttggaacacagcactttgtcctttagcttcaccgccattccatttcaaaaccggagtaacttctactacagcttttttcttgaaatacttttcagggaatttaccattaatggtagcaggaactttaccacctactgcttccaacacttgtggagtaacagtgaagtagtccgctgacaggggacccattttcttgcacgaagagaaaagtgcaacaacaattgccatgagtaaaggcaagtacaacttctttgtcattttaggtataaattaaatgtttgtaattgaaatatcgtcatatttataaccccttttcaatcctaataaaggaaaaacatcgcaaagatattaattcttaatataattatgtagttagcaggaggtttttatcataatttaatgaaaacccgactctttttctcgccgatacttgatatttcggggatgatgctcgataatctcgctgcgaagcatgtttcggtcgatatgggtataaatttcggtcgtcgcaatcgattcgtgtccgagcatgcattggatggcccgtaaattggcgccaccttccagtaaatgagtggcaaaggagtgtcggaaagtgtgcggactgatgtttttggtgatacccgcattttgtgctaattcttttatcatatgaaagatcataatccgggaaagtgatttgcctttccgctggctgacaaacacaaaatcttcatagtcttttttaacttctatccggttgcggtccaagaaataaagtttgatctcgttaatggcacggggggaaatgggaacaagacgttgcttgcttcctttgccttctactttgatgaagccttcatcaaaatagagatcggataatttgaggctgacaagttcggatacacggagtccgcagctgtataatgtttccagaatagctctgttgcgctgtccttcggctttgctgcggtctacggaggagatgatgttgtcgatctcttctacggtcagcacttcggggagttttaatcctatcttgggaccttccagcagttcgctgggatcagcctccagataatccgccataataaggaaacggaagaaggacttgatgccggataaaatgcgtgcctgagaacgaggatgaatgccgatgtcatgcaatcccgcagcgaaacgctggagatcggacaggcatacttcaagaacatctatcccttccagagtcagaaaactcatcagtttatccagatcggtcagataagcgtccaatgtattgggggataaagacttttccagcttgaggtactgctggtactttctgattatcagtgcttgttgctccttcttcttgtttttttcgttgatttccatttcttttttctacctttgtagcctgaaatattgttctttggatacaaaggtattaaaaaagcaggactacggcgatgagaatacaaattattaatggcccgaacatcaatctgttgggcaaacgtgaaccttccatatacggaagtgttacatttgaagactatctggctgagcttcgtaaaagatatgctgatttggagatcgactattttcaatcgaacattgagggagaaatgattgactgcattcagcaggtaggttttgaggtagacggcatcattctgaatgccggcgcttatacccatacctccatcgctctgcaggatgccattcgttctgtgacttctccggtgatcgaggtacatatttctaatgtacatagccgtgagtctttccggcatgtatctatgatcgcctgcgcatgcaaaggagtgatctgtggcttcgggctgaactcgtatcgtttggctctggaggctttgttaggtaataaataaggtattaatatattaaataggtaaaaaggctatgttactgaaacagacaaaaatcgtcgcatccatttcggacagacgttgcgatgtggactttataaaacagctgtttgaagctgggatgaatgtggtacgtatgaatacggctcacgctagccgtgaaggttttgaagcgttgattgccaatgtacgttccgtatccaaccggattgcaatcctcatggataccaaaggaccggaagtacgtacaactgccaatgcggaaccgattccatatcagataggtgataaagtaaagattgtcggcaatcctgatcaggagacgactcgtgaatgtatcgctgtttcgtatcctaactttgtgaacgatttgaatatcggaggtctggttctgattgacgatggtgatcttgaactggaagtaatcgataagacagccgattatctgctttgcgaagtgaaaaacgatgcaacgttgggaagccgcaagagcgtgaacgtcccgggtgttcgtatcaatcttccttcattgacagagaaagaccgtaacaatatactttacgcgattgaaaaggatatcgatttcatcgctcactctttcgtgcgcaaccgtcaggacgtacttgatatccgtgaaattctggatgctcacaatagtgatatccggattattgccaagattgagaatcaggaaggggtggacaacatcgacgagattcttgaagtggcggacggcgtgatggtagcccgtggtgacctgggtatcgaagtgccgcaggaacgtattccgggtatccagcgtgtgctgatccgcaaatgtatcctggcaaagaaaccggtgatcgttgcgactcagatgcttcataccatgatcaacaatcctcgtccgacccgcgcggaagtgaccgatatcgcgaatgcaatctactatcgtacggatgctctgatgttgagcggtgagactgcttatggcaaatatccggtagatgcagtcaagacaatgaccaagatcgcggcccaggctgaaaaagataaactggaagagaatgatatccgtatcccgttgaacgaaaacagtaacgatgtaacggccttccttgctaaacaggcagtgaaagctacatcgaaactgaagatacgtgccatcatcacagacagctatagcggacggaccgcccgtaatctggcagctttccgtggtaagttcccggtattggctatctgctataaagaaaagaccatgcgtcatctggcactttcttatggagtggaagcaatctatatgccggagctggccaacggacaggaatattattttgccgctttgcgccgcctgttgaaggaaggacgtttgcagccgactgatatggtaggatatctgagtagcggtaaggcaggtacacaaacttcattcctcgaaatcaatgtcgtggaagatgcgttgaaacatgcgggagaaactgtattgcctaacaacaatcgttatctctaactgttacatctaaaataagttttttatgcaggagactgaatctattgatgaatatattttgcagcatatcgatgcggaaagtgactatctgaaagcactctaccgggatacgcatgtgaaactgcttcgtccccgtatggcttccgggcatttacaggggcggatgctgaaaatgtttgtggagatgattcgcccccggcatatactggagatcggaacgtatagcggttattctgccctttgtctggcggaaggcttgtcggagggcggaatgttgcatacgtttgaaattaatgatgaacaagaggactttacccgtccctggctggagaattctccttttgcggacaagattcgcttttatataggagatgccttggagcttgttcctcatttgggcgttacgttcgatctggccttcattgacggtgataaacgtaaatatatcgattattacgagatggttttaaagcatctttccacaggtgggtatatcattgccgacaatacattgtgggatggtcatgtgttggaacaacctcgtagtacggatacgcagaccattggcatcaaagcattcaatgacgcccttgtgacggacgaccgggtggagaaagtgatcctgcctttgcgtgatgggttaactataataagaaaaaagtaagataaggagtaaatttatggaaacaaccagacagaataagatatcccgcctgttacagaaggagctgagcgagatattcctgcttcagacaaaggcaatgccgggtatattaatatcggtcagcgcagttcgtatcagtcctgatatgagtattgcgcgcgtgtacctgagcgttttcccgtcagagaaagcagaagaaatggtgaagaatatcaatgagaacatgaagtccattcgctttgagctcggaacccgtgtgcgtcatcaattacggattattcccgaattgaagttcttcgtggacgactcactggattatattgagaagattgactctttgctgaagtgaattttcccttctacatagcccggcgttatcttttctcgaaaaagaagcataatgctatcaatattatttccggcatatcagtatgcggggtggcacttgctacgttggcactggtctgcacgctttccgtattcaacggatttcaggatatggtagccagctttttcacagcttttgatcctcagttgaagattaccatccgcgagggaaaagtcttcgatggacaggatgaaaagattcgtgcggtctgtgcgcttccggaggtctcggtatctacagagacgctggaagagaatgcgatggtgcaatataaagaccgtcaggctatggttgtgttgaaaggcgtggaagataactttgaggatttaaccgaaatagatagcattctttacggagccggcgagtttattcttcatgattcgatagtgaattatggagtgatgggcgtggaactggtttcaactttgggtaccggactggccttcgtggatcctttgcaggtgtatcttcccaagcgtaatgccaaagtgaatatggcgaatcccggggcttctttcaatcgcgactatctttattcaccgggtgttgtgttcgtggtcaaccaacagaagtatgatgaaagctatattctcacttcccttgatttccttcgtaacttattggactatacgacagaggtttccggcattgagttgaaactgaaaccgaacgccaatatatcatccgtacagtctaaaatagaaaaaatgctgggtgatgactttgtggtacagaaccgttatcagcagcaagcagatgttttccgtatcatggaaatagagaagctgatctcttatctgtttcttacttttattctgatgattgcctgttttaatgtgatcggttctctttccatgttgattctggataagaaagacgatgtcataaccttgcgcagtctgggagccagtgataaactgatatcccgtatctttttatttgagggacggctcatctctctctttggtgctatctccggtattatactagggttgatattgtgtttcattcagcagaagtttggcatcattacccttggtggaggtggtggaacttttgtggtggacgcttatccggtaagtgttcacgtatgggatgtagtacttatttttattactgttttagcagtgggattcctgtctgtatggtatccagtgcgctatttaagcaagcgacttctgtaattggctgaagaagaaaaagattataaccttagaatacggaggtgtaggtattttgtaggggagtttgctaaagtggaactaaagtattttatgtatttgggcagaaactatataaacaaaaaagcgcaggcaggagacgaactcctttgcctgcgcttttctttttttctcagtcaagtgaattacttcacttcccaagtatcgtttgtcatcagcaactcttggaaattgtgatattttttcttgcctttgacttcttcaatctgttctgctacggcatcgttgtaggtaggcgcctctacttcacgaatcacaccgagtgcaatcgggaaatcaggaccttccatcaaagccaacttcaactgaagagtattgtcctggcaatgagcatcgtgaatcagaatatctttttctgtgatgccattctcgccaagtttcaccactttcagtccaaaaccttcctgcatcaatccgaactctttgttttcaccgaacagcatcggtttgccgtgttccagatagattgcattctttgcgcgtccttcctttgttgcaacagaagcgtgagttccgtcattgaagattacgcagttctgcagaacttccacaacggatgcacccttgtggttggcagctgctttcagaacctctacagaagcggcgccgtctacagcgatacaacgtgcaaagaaacgtccgcgtgcgccgaatgccagttctgccggatggaaagggtcttctaccgttccgtaaggagacgatttgctgacgaatccgcgttcggaagtcggtgaatactgtcctttggtcagtccgtagatacggttgttcaacagaatcatgttcaggtcgatgttacgacgaacagcgtggatgaagtggttaccaccgatagctagaccgtcaccgtcaccggaaatctgccagatagtcaaatccggattagccactttggcacctgttgcaacggcagcggcacgtccgtggatggtatggaagccatacgtatttacataataaggcagacgggaagagcaaccgataccggaaattacggcgatattgtgcggagctactcccagttcggccattgccttgtgcagtgagttcaggaaagcgtggtcaccgcatcccggacaccagcgaggctgacctgatttataatcttgtacggtatatactttatcgctcatctcttattcctccaataatttagtaaatgcatctatcaattctctcgtaacgaaaggctgtcctttcacttggttgaactggctgatattcagtccgggtactttcatacgcaggtaaccggcaaattgtcccagattctgttcggctactacgatcttcttatatttacgtaatacgtcggctgtattcttcggcagcgggttgatgtactggaagtgtgcgaatgcaaccttctttccatgttcgcgcatgaagtccatagccagacggagatgtccgtaggtaccgccccagcctacaatcagcaagtctgcgtcttcgtcgcccagcacttcaagttcggggatgtagtctgcaatcttgtccacttttgcctgacgcaggtgaaccatcttgttgtggttttcgggttcggtagagatagcgccggtttcgttactcttttcaagcccaccgatacggtgcatgaagccttctgttcccggagtcgcccagtagcgtgcgcctgtttcttcgttacgttggtacggggtccagttgcccgccatgtccggagttacatacggagggttgatggcagggtagtcattcagatcgggaagtttccatgcggcagagccgttggcaacgaaagcatctgtcagcaatacgaccggagtcatgtgttccaaagcaattttggctgccatgtaggcggcatcgaaacagttggtcggtgaagtggcggcgataaccggcattgggctttcaccgttacgaccgtagagtgcttgcagcaagtcggtctgttccgatttggtaggcagacccgtagacggaccaccacgctgtacgttgacaatcaccaacggaagttcgccgataacggccaagttcatcgcctcacttttcaggcagatgcccggaccggaagttgtcgttactgccagcgcacctgcaaaagctgcaccaacggcagaagcacaaccggcgatttcgtcttcgcactgtacggtttttactcccagtgatttatgcttggccaattcatgcagaatgtcggtagccggagtgatcgggtacgaacccagatacagttccaaaccggctttttcggctgcggcaatcaatccgtaagatgttgccttgttaccattaatatctgtataaagcccttttgatttcggagctttgctttcaatcttataagtagaggtagaagcgtgtgtgttggcaccgtagttgtagccatcgttcaataccttaatatttgcttctgcgatttccggtttcttggcgaacttctcgcgcagcatcttttccgctgctgccagattgcggttgaacagccagcaaaccagtccgagcgcaaacatattcttgcaacggagaatcgttttattgtccagtccggaatctttcagactttctttgcacatagaagagatgggcacttccagcacttcttgtttaacgcctaattcttcaaaaggattgttggtcttaaattgtgctttttccaggtctctggcttcgaacgagtcggagtcggtaatgataagtccttgcggtttacagaatttgatttgtgttttcagtgcggaggggttcatcgctactaatacgtggcaacggtctcctggagtgtacacctgtcctgcgcctacgtggatctgaaaaccggaaacaccggtcagtgaaccttgcggggcacggatgtctgccggatagtcggggaatgtacagatgtcatttcctaccgtagccgacacgttcgagaagatgttgcctgccagctgcataccatcgccggagtcgccggagaaacgtactacgacttcctccaattctttaaccatcatttcgtctgccataactttaattactatatttaatttaaaaactgattttactttcaatttgtgagcgcaaaggtcggaaagttaatcgaattatcaaaataaatcgaactttattgtcctattgacgccaaataattggatttactgaaaggaacctgcatttttattcttgttaaatcaacagaaaccgttatctttgcaaccaaaataaaagcggccttgtagttcaacggatagaatagaagtttcctaaactttagataggggttcgattcccctcggggctactaagagaaatctgcgggaggcggtgttgttttgcttcatactgtattgagttttaagtattacaatggcttctttaaagattaacgtcttatagcttctatttgttttaataatcaatagaaaaagcctcttccgaacattcggaagaggctttttctatttctggaatttattattcttccgtagctgctaccactacttttttgttcttcatcatgttgtatgcaatcggagatgcaatgaacaacgaagataaagtaccgataacaacaccgaggatcattgcgaatgcgaagctgcggattgaatcaccaccgaggatgaagatacacagcaatacgatcaacgtactcaatgaagtattgatggtacgagccagtgtagtgttcagagagtcgttgaacaactgacgcttgtcacgtttcggatacaagccgaagaactcacgtacacggtcgaagattaccaccttatcattaatagagtaaccgatagccgtcaggatagcaccgatgaatgtctggtcgatttccagtgagaacggaacgataccccacaacaatgagtaagcaccgataatcatgatcgtatcacaagtcagagctacgatagaaccgatactgtaagcgatgttgcggaaacggatcaagatatacagaccgatagcgatcagagccagaacaactgaccatacggcaccagtcttgatatcatctgcgatactcggacccactttctgtgaactaacgatactaccgcctgtgtgattgtcacggtcgatgaaagtagccagtgtgatgttctgtgtcagcaacggcttcagtgtttcgtataagtatgattcgatctcagagtctacattgttaccttcgtctgcgatacggtagttggtactgatacgtactgtcttcttgtctgtaccgatagcgatcacatttacatttacatcttcaccaaacttgtcagcgatcagttcacgaacttgttccggttctaccggattctcgaattgtaccttgaagttacgtccaccggtgaagtcaatactttgacttaaaccacgcaatgcaaacgaaccgatacaaacaaggataatagcgcttacgatgatcagtgatttcttattggttcccatgaagtcgaaacgggtatttaccagcaagtttctggaaatcttggaagtaaatgtcaggttcagccacttgtctttattcatgaagtgttcgtaaaccagacgagtcatgaacacagcagtgaagaaggatacaaggataccgataatcaatgtagtggcaaaaccacggataggacctgtaccgaagttgaacaggatgataccggtgatgatagatgtcaggttggagtcgaagatagcagagaaggcatttgaataaccgtcagccaatgctttcttcacacccttgccggcacgaagctcttcttttgtacgttcatagataagtacgttcgcatccaccgccataccgagtgacaacaccataccggcaataccggacatggtcagtgccgcctggaaggatgaaaggatacccagcgtgaagaagaagttcaggaacaatgcgcagttggcaaccatacccgggatgaagccatacatggaacacatatagatcatcaacaggatcaaagctacaacgaatgagaaaatacctgcgttaatagattcctgacccagagaaggacctacgatatcttcctgtacgatatgggccggagccggcatcttacctgatttcaatacgttagctaagtcctttgcctgttccggggtgaagtgacctgtaatctgtgaacgtccgcctgtgatttcagagtttacgttcggagcagaatatacatagttatcaagaacgatagcgatagaacgaccgatgttctgcttggtcagctgtgcccagcggcgtgcaccgtcagagttcatggtcatgcttacagccggtttactgtattggtcgaattcgtcttttgcatctgttactacgtcaccttccaacggagctttgccgttacgttcggtagacttgatagcatacaattcgaatgtctgtcctttcttatcgaattcagaaggagaaacaccccatttcagacgaaggtctttcggaagttctgactggatttcaggcatgctcagatatctgttgatatcggctgtatccttatagttagcatagccgatcaccggaccctgaccgcttgaattcaactgaagaacagctagcaacggatattgctttttgatttcttccatatttgctcccgccttttcgtctttggcatctcctttcagagtagctgcgagactgtcggcaacgcttacggctttctttgccggagtagcttctgccagtttggctgcggggattgtgtctgcagttgcgttagtggctgtagaatcagcggcagtttcctgtgacaggatagcacgcaattttgagtcagccgactgcatagccggaagaatctcttttgcagtatatgtttcccagaattcgaggttggccgaaccttgaagaagttttctcacacgttccggctccttgatacccggaagttccaccatgatacggcccatcttatcttcgaggctctggatgttcggctgaacaacaccgaagcggtcgatacgggtacgaagcacgttgtatgagttttcaacggcagcctttacttctgctctcaatactttttctacttcggcatctgatgatttctggttaactttatctttcaactgttgtgttgcgaaaagttcggaaagttttgcgcccggagcagtcttctggtattctctgacgaacaaggtaatgatatcgtcctggctgttgacagcttgttttgcagcttcattcagcgctttattgaagttttcatccggcttgttgtcagccaatgctctgataacatcaggcacagaaacttcaaggataacattcataccaccttttaggtccaaacctaaactgatctccatttcacgacaatctttcagcgtccagttccacagcattactttctcattggagagagagtcaaggtagtcttgttctactttcgggtcgccgttcgcaatctctttcgccttattagtgtaatggcgggttacgaaggagaaggagaggtagaacacgcataccagcgtgagtagtaccgcaaaaacctttacaaatcctttgttttgcattttacttttaatttatgatgattacttttttaatttaattttcagttaaattctgtcgtatacaagtccattttgccgcatacaaggctgcaaatatagtttttttttcacattcatatgtaataagccctcaaatatttgatgtttaagggcttttttgccgttttatttcattcctctgtttttcagtaacggctccaggcttggttctgcaccgcggaaattcttataaagtatcatcggatcttcgctgtctcccttctccaatacgttgtagcggaagaggtcggcagtgtttttatcaaagattccatgttctttgaaggcttcaaaggcatcattgtcaagtacattcgcccaaaggtaactatagtatccggcagcgtatccgccaatgatatgattgaagtaagtgacgcggtagcggggggcaatttcggggatcagaccgagcttgtccatggcttctttttcgaaagcaagcatatccagattctttacatctgttatcatgtgaaggttcatgtcgaggatggcggcagccagtaactcggttgtcatgaatccttggttgaacgttttctgtttcagaatcttttcgatgatttcatcggggatcacttcacctgtctgatagtgtttggcatacattttcagcacttccggttcggtagcccagtgttcgttgatctgagaaggaagttcaacaaagtcgcgtacgacattggtgccggaagttcctttgtattcgcactttgtcagtaagccgtgcagggcatggccaaattcgtggaacagggtttctacttcgtccatagtcaacagagaaggggtgtcgccgaccggtttggtgaaactgcatacgttgcatactaagggacgcgttgctccctgctgttcgcggtaattgctcatccatgcgccaccgctttttcctgaacgcgggaaatagtctacatagaatatgcccagttgggagccgtcagcgtctttcacttcgaagacttctacatccggatgataagtcgggataccttccagtttgttcagagtgataccatatagtttgttggcgactgcgaaagctccttcgcgtacattttccagtttaaaataaggtttggtgtcttcttcggagaggttgtatttctctttgcggagcttttctgtgtagtaccaccagtcccaggcttccagtttctctcctttgccttctttgtccattaactgttgaagttctgcggcttcggctttcgctttcgggagggcatagctccaaaggttgttcagcagactcattacgttgctgtcattctttgccattgtttcatccagtacgaagttggcgtagttgttgaagcccaataaccttgctttttccaggcggagggagacgatcttgcggatcgtttctttgttgtcattcttgtcattgttattgccgcggttgatgtatgctttgtacattttctcacggagagggcggttctcagcgtattgcaggaacggaaggcggctggcgttgtgcagggtgaacagccatttccccggttgtccggcagcttttgcttcttcggctgcgctttggcagaaccattcgggcaatcctgctaaatcttctttcttgtctacgaaaagctggaaagcattgttttcattcagtatattattgctgaatgtgatgccgagagtggaaagttctttgttgatttcacgcagacgtgcctgtttctctgcatccagattagcacccgaacggacaaatcctttgtaagttttgtccagcagacgtttctgttccgtggtcagattcatggaatctttctgttggtatacagcgtttacacgtttgaaaagctcctgattcagggagatgttatcttcgtgctcggaaaggaccggtgccattttgatagagagctcggtcagttcatcggttgtttccgcatccgtcatattgaagaaaatggcgcttacacggtccagaatgggtgcgctgttgtccaaagctacaatcgtattgttgaaggtaggcacttccgggcttgcgataatggcctggatattttgattctgctcttcaatacctttcagaaaggcgggttcgtaatgttccagtttgattttatcgaaggaaggaacaccatactctgtttgaaattcagtgaagaaagggttgctttctgtttttgttccacaggagtacatcatacaacttgctgctaaaatggttaaagtttttctaatcatcatggtatttattaaagttttttctgttttattgcttgcctatatagcaccagatcgggtaatggtccgaatctttgatcgaacggtctacggtacagttataggctttctgattggggctgatcagaatattgtctatccggaaatagaatttattcagattataggagatgcccagtcccctgccggattgtgtaaaggcgtcatccagctgttgagtcaggatgcgatgggtatatgaaatggaagcgtcgttgaaatcgccacaggtaataatagtcgggtatttgctgtttgcgatggcgacggctaccgaatccgcttgcgaagaacggatggccgatgcttccgccagtttctttattaattgccggagtcccgtttttaccttctttgcgttcgggtctttaatcatatcttcataaatcaccttgtcttctttcgtcagtttgttggattccagatggttgtttatgagggtgatagtgtcctcgttaactttcagggtgtactgcatcgaaccgttgtaggtgctttcatacttgatgggacgtgccgaaagtatggggaatttggagaaacaggccaactgactgcctcctttttccggattgtgaatggaacggtagggatatgctttcaatgcttttctgatgtcttcgtctgtcagatatttcttgtttttggttgaattgtactcctgaagacagattatgtcagcttcactgtcagccagataggataatatcggattctttccttcctttttctccagattgttaaatcccatcacattgtaagagaggaatttgatgctgccatccggtatcgtttctactgtagaattgatgggaatataggtgcgtatctgtggaatacataccagaaaaccgatgaccggtaataaggcatagcggtagctgatgattacccagaagagggtgaaacagatgttgacagcaaggaagatggggaaggcaagccccaggcaagaagctatcgggtgtattttcggttgaagatacgggctataggcactcaaaatcaacatccctacaaagagtgcgttgactgctaatatcaaataaaggacaaatttgccaatgtgttccattctttatcttttgcttgcgtcgaacaagctctttttctcttccgtcgtcaggctttcataaccggattttttcagcttctccagaatgcggtccacttcatccgattgtgctttcttacgggcgttataatcgtaatctttctcgcgacttgtgtcgcttccataatgtactttcatttttggtttgcgtttccatgtctttttctgaaacagggaagcgaagccgtcaaggaaccagttgatccagtaagtcacgtctttgcctttgctcagactggctgcaaaccaaagtccggcaagtgcgccgcctaagtgggcgatgtgtcctccggcattgttggatgtaataaagagcaggtctgttccgataacgatcagtgcgaggtatttcaaacggacggcgccgaaaaggaaaagttgtacccggtagttcggttctctgtaggcggtggcagctacgatggccagcacggaagcggaagccccgaccagtgtggagaacggcaatgtctggctgaaataagggaagatgttatacgctatcatgtagaacaatcctccgcagatgcctcccaatacatacaatccccgtaaatgctttcccgaaaagaaatagagaaacagacttccgaaccagtacagccagagcatattgaacaggatatgcaggaagcctgcatgcatgaacatatagctgagcaatgaccatggctgaagaataaaccggtgaagggaagccggaagggcgaataaatcgaatattcccgttgcactcaggttgaacagctgcaatatgacactgattaacgtaccgataacaaagatgcctacgttaatgtaaatcagtcggatgaaagtgtttcctcttctgaacgtttcttttaaatcagttataatatgtcccattgtttctacttttttttctccaatacataatcaggataaatccgaatatcatacctcccaagtgggcgaaatgcgcgacattatctccgggattattggcaaagccggcatacagttcaatcaaagcataaccgataacaaagaatttagctttgatagggaagggcagcggaaagatgaatagctggttgttggggaacaacataccgaatgcgagcaagatagcatatacagctcccgaagcgcccacggtggtcagcatgttcaaaaactctcccataggaataatccccgttcctatatccacttgtgaatagtggctgtagtctactatatatttgatgtattgcactccttcctggataagtcctgcgccgataccacagacgatataataaaaaaggaaacgtttcggtccccaggtccgttcaagaacagttccgaacatgaaaacagcaaacatattgaaaaaaatgtggctgaatccgccatgcatgaacatataagtgataagctgtgccggattgaagtcactggcgaggaaaaaatgcaatcccagataattagtcagatcgataccgtatcgttgagcgacaagtgtcccgaaaaagactagtacattgataattatcaggtttttagttacagttggcataattttatattctgaatatttaagtaatgaacgcaaaagtacgaataaattctgttttaaagcatggaaaagcttccctattagctctttttcaataatttgctgcgttttttttatgtttttatttgatatgttgttttgttcatctatatttgtaaagtcgtaatgggaaatcttttgtgtaacatatatattaattaatcattttacgtatcatgaataagtctgaacttattagtgcaatggctgctgaagctcaaatgagtaaagccgatgcgaagaaagctcttgatgctttcatttcttcagttactaacgctatgaaagctggtgataaggtagctttggttggttttggaacgttctctgtaagtgaaagagcagcaagaaccggtattaatccttctacaaaggcagctattactattcctgctaagaaagtagctaaatttaaagctggtgctgaattgtctgcagctgttgaataaacatatagttgaaagaaattagaagagggaggcgcgtgcgtctcctttttttgtatctttgcgcgcaagaaacaacttgattatgaagatagaagataaacttgtagcgtccgtcatcaacggactaaaagcactttacggtcaggaagtccctgagaagatggtgcagttgcaaaaaacgaagaaagaatttgaaggacatttgacactggtcgtgttcccttttctgaaaatgtcaagaaaaggaccggaacagacagcgcaggaaattggcgaatatctgaaggcgaacgaaccggctgtagctgctttcaatgtgataaaaggctttttgaatctgactattgcatcggctacctggattgagttactgaatgagattcagtcggatgaagagtacggcctggtgaaagctaccgaaacttctccgttggtgatgattgagtattcttcaccgaataccaacaagccgcttcacttggggcatgtgcgcaacaatcttttgggaaatgcgctggctaacattgtggctgcaaacggaaacaaagtagtaaagacaaatatagtaaacgaccgtggtatccatatctgcaaatccatgctggcatggaagaaatacggaaacggcgaaactcctgaaagcaccggcaagaaaggtgatcatctggtaggcgactactatgtgtctttcgacaagcattataaagcggaacttgccgaactgatggaaaaaggcaagtcgaaagaggaagcggaagctgcttctccgttgatgcaggaagcccgcgaaatgctggtgaaatgggaagccggcgatccggaagtacgtgccctgtgggaaatgatgaacaactgggtgtatgccggatttgatgagacttaccggaaaatgggtgtcagcttcgataagatatattatgaatccaatacttatctcgaaggaaaagagaaagtaatggagggactggaaaaaggctttttcttcaaaaaagaagacggctctgtctgggctgacctgactgccgaggggctggatcataaactgcttcttcgtggcgacggaacttctgtttatatgacgcaggatatcggtactgccaaacttcgtttcgctgattatccgattgataaaatgatttatgtcgttggtaacgaacagaattatcacttccaggtactttctatcctgttggataagctcggttttgaatggggtaaaggtcttgtacatttctcttatggtatggtagaattgccggaaggtaagatgaaatcccgtgaaggaaccgttgttgatgccgatgacctgatggaagagatggtatcgactgccaaagaaacttcgcaggaactcggaaaactggatggtttgacgcaggaagaagcggatgatattgcccgtattgtcggtctgggtgctttgaagtactttattctcaaagtagatgcccgtaagaatatgactttcaatccgaaagagtctattgacttcaatggtaatacaggaccgttcattcaatatacatatgcccgtattcagtctgtgcttcgtaaagcggctgaatccggaattgtgatacctgaacagattcctgctggtatcgagctgagcgagaaggaagaaggactgattcagatggttgctgactttgcggcagttgtaaaacaggccggagaagactacagtccgtctattatcgcgaattatacctatgatttggtgaaagaatataatcagttctaccatgatttcagcattctgcgtgaagagaatgaggcggtaaaagtattccgtattgctctgtctgccaatgtagcaaaagtggttcgtttaggaatgggcttgttgggcattgaggtaccttccagaatgtaatacctgccctgaacaaaatatatttatgtgttccggaacgggactggatgttgttgaatagaaaaagactgtccgaaaaggaattgtacactatctttaagaaagactttgggtaaagttaatgatagggattacatacttttcagacagtcttttttattattgggtaattactttcgaattatcagggtctttccaccaatatggattggaagcgccgaagctggatgcccagtcaccaaatttaggatacgcttccaaaatgcttgtcgtttctactggtacaaggaaatcggtaccacgtttagttcctacactgataccgctaatctgcagtcccgttggcatattctcattatttacataatataatccctcatcaggcctggatacatcactacctgtgccgaaataagagaaattcattttacttgttggagggaatttcacaatatgtgcttctttatcacgtcctgtattggcagaaatgatgataaaggggttcatattaaatttgctgtatgtttgttcccaaaatttgttattaaagaaaggagtaaatgccgtttctgtaaatctttcttgggcgacgtctatcgttacagtaaacgttttgtttatagctgctttttgattgtcaaaaaggataatagtgggataattttgaccaggttcccggtcttgcccttccatgaattgtgagacgattccgccggattctacggttattttctttatatcactatttgctatacctgtaagctggtaaccaaaaccgttttgccagtttgcaccatcatgtttaggcacaaatgtatctataacttttacgactttacttgtgagaacactcttataaatttcgcgcttatattcgacaatcatatcattcatgtcataatctcctttggatggccaaaaatcttcaaatgataatacacctttaaaggagttataaatctctttgtcattaatggatttgtctgggagttcttctacaccaccagtctcaatggctgatccatctgagaaatcaagatagaatacggcatcgccaaagtttccttttctggtattatctcctgtcggttcaaagttggttgcatcctccataccaaatgcaacgacttctcctgatttgttctttagggcaatggtacggtgttctttgctcttattcaggtcacgaatagaatagaaagtacgtttattattcataatctcctttgtgccttggttgtaggaagactcaataagaaaccatgctatgcttactcccgcagggaactcgttcacgaactttgtgccatcccaatatttcagttctactctgtcgccggtatacatactacctgctgtactgctggaattacacacggcagtcgatatgcgcggataggcaatgatcggtgtaacttgacttatatcagtcggcttttgatcggtagggtaggtgaaataaccgactgtattttgcttggtacctgtactgctgagcataactagtccgatttctgttggtttcttaacattgatttctatatttacattctcatctatatattcaggataataatcttccatcgctgcacttccacccggcttaataaaaacttcacggatattatacatgagctgcccatctatttccgttggagtagaagaaagataagtaggacatcctatctcattccattcacctaaaacctggaaaccttccggatatttgtagccgctattggtaacccctctactcgtacccttcgcatttcttttactttgtataaaagctttctgatcaaaagatacttttccgtttgtaatttgtagctgaatcgggctgacagttccaagatagtctgaataaaggtaaagttctgtaagataagacggaatagatatgaaatcattaaagattccttttttatccgtagccccgcgatagacaggctcttcttttgtcttgataatgtttccatccttatcttccgatagcggattttcggcatataactcaaaaacaacctgataatttaaaccatagtttaaatcaactgtgcaactagaggatgttgtaaagccaaaatattcatctgcagttttttcttctggagcctgatataagtccttttccatacaaccggctaacgagagtgcgcatagtacccccattgagagagatttgaaattgtttgtttgcataactgtgttctgataatttgattgtgacccgcaaatgtatgtatttaatatatcaaaacaaagagtttggaaataaatcgtttaaaaagaaatatatagcatggtaaatacaacaaaagtccggtaaccagttgatataggttaccggactttgatgtctcattgaatgcaaatattatttcttttttgcggttcgtttacctttggcagaagtgccaggacctttctcatcttgtattttgactaactccaggcaactcttcaaacttagatcctgaggaacaatgtctttagggatcttgtaattattgcctttgtatgcaatgtaaggtccgtaccgaccattcagaatctccagttccggttcttcatcaaacttcttgatatggcgttctgcttctttcgcccgtttttccagaatcagctgctctgcttcttccagagtaactttcatcggatcaagtgttttcggcagtgatacatagaccttgttatgctggatgtaaggtccgaagcggcctacacctacactgacagtctttccttcatactcacctaaagtacgtggtagcttaaacagttccagtgcttcttccagggtaatggtctccatggactgccctttcttcatctgggcaaaacgaggcttctcttcatcatccgcggcaccgatctgtactacaggaccgaaacgaccgattttcacagagacaggcttgcctgttcccggttcttctcccagcatacgttcgccgactttatgttctgtctttatagataatgtcttttctactgccggatggaactgatcatagaaagtcttcatgatagaagtccatttaacttctccttccgctatttcgtcaaattccttttctacactggcagtaaagttgtaatccagaatatccgggaagtattcggtaaggaagtcattcaccacagttcctgtatctgtaggaaagagtttcgacttttctgctcccgtcacttcattgtgactttcatctttaatctgattgtctttcagtgtcagcacattaaatgtacgttcttcaccgtctttatttcctttttccacatattcgcgttgctggatagtagaaatcgtaggagcgtatgtggacggacgaccgatacccagctcttccagtttacgtacaaggcttgcttccgtatagcgtggcgggcgttgagtgaaacgttcagtggcaacgataggtccatattccagtttctggcctttctttaaaggaggcaacagacggctctcatcttcctgttcattctcatcgtcataagactcacggtatacacgtaggaaaccatcgaacttgataacttcgccgatggcagtgaatgcatcaccgcttttgcttatagagatggtagcagtagtcttttccagttccgcatccgccatttgtgatgcgatggtgcgcttccagatcagatcatacagtttcttttcctgtgctgtgccttctatggattgattttccatgtaagtcggacgaatggcttcgtgcgcttcctgtgctcccttcgtctttgtttcgaagtggcgcggatgtacatagcgttcgcccatcatctgtatgatagcgtctttgctgctggctgttgcatattccgacaggttgacggagtccgtacgcatataagtgataaatccggattcgtacaaacgttgtgcgatcatcatcgtttgtgctacggtatatcccagtttgcgtgccgcttcctgttgcagggtagaagttgtaaacggagccggcggcgttttctttaccggacgggtagttatatcttcaatcgtaaaagtcgctcccttacatgcgtcaaggaatgcttttgcttcttctttcgttttgatacggcgtgatagttccgctttcatttctaccagcttgccgtctgtatcgggaaccaggaatatggcgataacccggtatgcggcttctgatttgaacgcatgaatttcgcgttcacgttctacaatcaggcggacagctaccgactgtacgcgtcctgccgacagagatggtttaacttttctccaaagtacaggagacaattcaaaacctacaattctatccaggattcgtcgtgcctgctgtgcatttacgaggttgaggtcgatattgcgtggttgttcgattgcttttaaaatggcacctttggtgatttcgtgaaatacgattcgttttgtgttttccggttttagttttaatacttcatacagatgccaggcaatagcttctccctcgcggtcctcatcggatgcgagccatacggtttctgcctctttagcttctgctttcagcgtgctgaccaaagcctttttgtctgccggaatttcataatcgggtttaaaattcttatctacgtcgatactgaattctttcttcttcagatcacgtatatgtccgtaactagaaaggactttgaaatctttcccgagaaatttttcaatcgtttttgcttttgccggagactcgacaatgacaaggtttttttgcataattctttcttttataatggcttgtaccatgatatttcggggcaaaagtaaaaaaaaagattcgccctaccttataatataaggagaaactaatatttttttggaaaaaaataggttttgagtaaatctgcatttcttttgtatgcgcaagtattattaaagaaatgttctataattaaggggaaattaatataaaacagttttatttaaatagaatttcctatatttacacctttgtacagtattatgtggctatttatgagaaagattctatttaaaatatatctattgtttttctttgtaggtattgcacaacctatattgagccagtctccttattattattacaaacaacttggaataaaggaaggactctcacagtcgaaagtacaatgtgttctgaatgatcatcgggggtatctttggattggtacggaatccggtttgaattgttatgaccgtgaccatctgaagcaatatctgcatcgcccgggagatgaaaaaacgctgccttccaacaacatcacttttatcgctgaggactctttatgcaatctttgggtagctacgatgaacggcatttgcctttacgacagagggagtgatagtttcagaactttattgaataatggtaaaccaatctatgttgcttcctatttattggttgaaggaggaatcttactgggaggatcaggagccatatacagatatgtctatgccactaataagctggaacctttgtattatgcgcaagaccctgtttattacaatcccttttggcagatgatacgttatgatgaagagaatatcctgctcaattcacgttggcacggcatatattcctttaatatgaagacgtatgaagtgaagaaaatagagtcgtttacagaaaataactataccagtatctatctggactcctacaagcgtctgtgggtaagtgtttatggtaacggactgtattgctatcagggagaccagttgataaaacactttacggcgtcaaattctcctttgacgtatgatgtcattcatgatatcatggagagagataatcagctttgggtagccactgatggtggtggaatcaatataatctctttagatgatttctcatttactaatattcaacaaaaacaggatgatgttcattcctttccagcaaatactatataccgcctctatctggacccggccaataatatgtgggcaggcagtatcagaagagggttgattggtataaagaatgtgtatgcctgttcttatcagaacgttccttttggcaatctgtacggattaagcaaccagactattaatagtttctttcaggatagtgacggaatagtctgggtgggaaccgatgggggaggtatcaaccggtttgatccggtatcgggtaccttcaaacattatcctgccaccaaatatgagaaagttgtttccattgtggaatatactcctgacgaactgttgttcttctcctttaataaaggactctttatctttcataagcaaacggggcagatacgtccctttgtgctgattgacaaggaaatgaatgatcagacctgtatcaatggtttttctgttaatatccagcggataacgaagactaaaattcttttcagtgcccagcatatttttatatatgatatggtcacctgtaagtttgatatagtggctactatgggagaagagtacgagcgtcattctccactgataatagctacgaaaggtgcaaagacatacctttccgatctgaagaatatttgtgagtatgattcttcggaagggactttccggacgatttataaagggcaatacactatcagtgatgcctctatggaccaggatggtgttttttggctggcttctgccgaaggcttggtgcgttatgatccacggacagggaagagtgagctgataaatacaagtctgtttcaggatgtagcttctgttgttgccgataatcaatatcggatctggatagggacgagacgtcatttatttgtttattcttcccgtacccataattttgctaccttggaggaggtagatggagttctgcctaacgaatacatctttcatgctactcttcttgccgacaacggagatgtttttgtcggtggtaccacaggcatgacggtgataaactctgccgttcattttgatacagatgaggattatacggtcgaactgctggatgtattattaaacggtctgcctgtctcgttatccgaagagccgcaggaagcggctgaaacaattcaagttccctggaacttttcttccctgcaactgaaagtactgctgaatgaaggcgatgtattccgcaagaatttctttcgtttcaatatcgagggactcgatcaggaattggcgagttccaattcaaactctttggttattaactatctgccgataggggagtatacgattaccgcttcttattatacccgtgacggagggtggagtacgaaacaacccattctgcatgttgtggttactccgccttggtggaagaccggctggttctatatgggattatatatattgttgggagcagtggcttatagcattgtctactacttctatcgcaagaagaaagccaaacagaaacgggagattatgcgtctgaaaaataagatgtatgaagaaaagattaatttcctgacgaatatcagtcatgaacttcgcactcctcttacactgatttgcgcaccattaaagcgtattatcaatcaggagtcggacaagcaggatgtggaaaagttgttggtcccgatctataagcaggcataccagatgaagagtatcatcgatatggtactcgatgtaaggaagctggaagaaggaaaagatatgctgcatattctgccgcatcctttgaatgagtgggtgcgctctgtcggagataagttcatcagcgagtttcatgtgaaaggtatcagactcgaatatgagttggacgaacagataaaagaggtaccattcgatcagaataagtgcgagttcgttctttccaacttcctgatgaatgcgttgaagtttagcgaatcgggcaccactactacactgattaccaccttgtcacaagagaaagactgggttcggatctctgtcagggatgaagggatgggactgaatatggtagacacagattctcttttctccagtttctatcaggggggacatgaaaaaggaggaagcggcatcggattatcctatgcgaagagtctcatcacacaccataaaggaagagtgggcgcttcgaatgcagcgggaaaaggggccatcttttattttgaactacccttattcacggatacttgcggacagctggaaccagcttctgtggaagcagctacaggcgtggaagtgaatgaaccggatagaatcgattataccttcctgaaaaaatattcagtgatggtggtcgaagatactctcgaactgcgaaactatctgaaagaaacgctgagtaattattttgcccgtgtatatgttgccaaggatgggaaagagggattggaacagatcaaagaccgattgccggatatcatcatcagtgatgtcatgatgccccggatgaatgggtttgaactttgccgggaagtgaagactaatctggatatcagtcatattccttttatcttattgaccgcctatcataattctcagaatatgtataccggttataagaccggagcggacgcctttttgccgaaacctttcgaaatagacggtttgctggcattgattcataatcagttgaggcagcgcgaacagatacgggcaagatataaagatgataagctgctgacacacaaggaagtgagctttagcaatgcagatgaaactttcctgctgaaattgaatacattgattgcggataatatgagtaatccggaactggatgttgcattccttgctactaatatgtgcatcagccgttcgttgttattcaataaagtgaaggccatcacgggtatggggattgtagactatgtgaataagcagcgcattgagcagtcaatcgtgttacttactactactaccatgaacattactgaaatctccgaagtggtcggcttctcctctttgcgttatttcagtaaggttttcaagtctataaaaggagagattccttccgcttatagaaaacaggataagtaaatcgcattgataacttgaacttaggaacatatactagaaataaaaaaataaatattagtctcatgctctcattctgtatgaggtaaatatcatataatcagaacgatatgtaatgagagatacttcttttgccaggtatctctcattcttttacgtaagcgtctcggcgatgtcgtcttttctttaattctacttcttcatatctttgctttcatattaatcaattcctacttatatgactgcacacgctttatacactcaaaccctgtctgagtataaatcccgtctgatatcttctccctgtttaactcttcgtagttattgtcatgagtgtcatgttaattatcatggtatggaactctggctttctcggcacggcattcgcattcgtgaacttcgttcttccctttcggcttcttcctccgaaaagccggtaccctgcttcagtcctttggttccctcatccgcgccttcggcccgtccgtcctcttcttcggatatgctttatggtatcaatattacttttccggatggggtgattatttccatcaagcagggaagttcttttggtattcaccgttttattgacctttacaaccgtaaaatacaggaggaacaatcatgtttgctttaaccgaaaatatgcgttattacctgtgtcagcattatgtcgatatgcgtaaaggtatgacgggactttatcagctgatcaagtccgacatgtcactttctcccgtttcaggagatgtttttgttttcttttcccacaaacgggacatggttaagattttacgttgggatacggatggttttattctttaccagaagcgtctggaagaaggtaccttcgaagtcccgcgttttaatccttctacgggtgcttacgagctttccaggaagagtttctttttaattatgcagggcgtctccctccggtcaaccaagtgcaggaaacgattccggctgaagccgtattgatgccaaccatctgacaaacagtattttataatgtaattgtataataaaaagctttgttgtccggttcttttttcgtatctttgaggtatgaaaaaagaccgggtcatagaacttctggaggaacagaacagacatttcaaggaacagattaaagctgctgacaagcgtgagcaacaaagtcagcgtctgatctgtgaactgacttcacaggttcagcaattgaccgatgccgttcaatccctggaagaagcgctgacgctgaagaacggcaaactgaaaaagcaggagaacattagccgcagtttgagtaagcttgtcagcaacgagtctgaaaagcaaatatctgataagtcgcaacccgtttctgagacagctccgtcccgtccgtctgcttccccaaaagaacgggggaataacaactccaaacgtaaagagcattttgaactggaagaaaagataatcgaagtcaatcccgatcatccccttttcagtatgtctcttgccaaatttatgggataccgtgattctatccgatatgtctatattccgccaaagttcattaagtacatttatcgacagaatatttatagctttaatgaaacggtcttcagcggttgcgcccccgccgccccttttctgaattcccaatatgacggttcgttcgttgccggtttatgccagttgcgatatatctactctatgagtgtagaacgtatcgttagcttctttcgggaaaacgggttcgaactcgagaagcccactgcccatcatctgctgagtaaaacggctgttttgttcgaaaacctctatgaagcactcagagaagtggtgcttgaagatccctacctctgttgtgacgaaacatatcacaaaatactggttccggagaagaacagtaaaggcaaaggggtacgaaaagggtatatctgggcagcagcggcggcgaccttaaagctggtgctctatttctatgaggacggatcacgtagacaggaggtgctttttgatttcctcaaaacctataaaggaacagtacaaagtgatgcatacgccccatacaggaaactggaaaccgaccaatatcacaatatcacgaggatcgcatgccttcagcacgtcaaacgaaagtttcttgaacaggataaggatccggacgcccgaaagatagttgaaatgataaaccaactataccaaaaggaacatgaacatcggacaagctatcagggatggacaatcaaagacaatctcgcacatagaaaacagtatgccccgccaatactcaggaagataaaaaagaaattattgagcctgcagacaaagccggacttattgccaaaaagccaaatggcggaggccattaattacacactatcccagtggaaggccatagaggatatctttaccaaaggggagtattatctggacaacaaccttgtcgagaggtataatcggtatatatcactatccagaagaaactcacttttcttcggaagccataagggggctgaaagaggggtaatactatattcattggcatgttcgtgcaggatgcatggcataaatacattcgagtatatagccgatgtgattaacaaagcggcgaagttaccaccaaatacagacaggaaaatatataccttaattccgcaacactattataaattaaactttttaagtacctgagcaacaaaaagttgctcaggattttgccatgtcagaattttcacttatcttagtgttgcaaaaaaaacaagagaatccgacgatagacatggcgaagatacaaattaaatctgagagactcactccttttgggggattattttcaatcatggagcaatttgactccacattatcatctgtaatcgactcaaccctcggtctaaggtgtagatcgttcggttatcagtacagcgaaatcatccgttctctcatgagtatctacttctgtagcggttcatgtattgaggatgtcactactcatttgatgaaccacctctcgcttcatccgacacttcgcacttgtagctctgatactatcctcagggcgataaaggagttgacgcaagaaaacatttcatacacatcagatatgggcaagacctacgatttcaatacggctgacactctcaatactttattgctcaattgtatatttgcatctggccaactgaaagagggtgagatgtatgatgttgatttcgaccatcagttcatagagacagagaagtatgatgcaaagcctacatacaagaagttccttggttatcgccctggcgtggcggttattggcgatttgatagtcggtatagagaatagcgatggtaacacaaatgttcgtttccatcagaaggacacgctgaagaggttctttgcgagatttgaacagaatgggctcactatcaatcgcttcagagctgattgtggatcatgttccgaggaaatcgtggaggaaatagaaaaacactgcaagtccttctatatccgtgctaaccgctgcagttcgatctacaatgacacctttgctctcaaaggctggaaaactgaggaaatcaatggcattgagtttgaattgaactctatccttgttgagaagtggaaaggtaaggcatatcgacttgtgattcaaagacagaaacggatggatggtgtgcaggatttttgggaaggagaatacacataccgttgtatcctgactaacgactatgattcttccgtaagagaaattgtcgagttctataaccttcgtggaggaaaggaacgtatcttcgatgatatgaacaatggtttcgggtgggacagattgcccaaatccttcatggcagagaacacagtgttccttcttcttacagcacttatccgtaacttttacaaggccattattcaaagacttgacgtaaagaagttcgggctcaatgcaacaagtcgcataaaagcgtttgtcttcaggtttatctctgtaccagccaagtggatcaggacatcaaggcggtatgtgctgaacatctatacctgtaataatgcttacgcagatgttttccagactgattttggataatgcctacaacttatgggaatgatattgtgtattgcctcaagtcacattgtggggtaaggggatattgtaggcagaagtgggtgcttcaagttcaaattatctgcaaattcagtaatgagaggacgtgtaaacgcaataaggacgttcaagggcttagttgcggatttgaggatatagagatttattgccacacaaatggaaggaaaacagaaatagaatctgaaaagaaaaggataaggagatttttttcacaaaaagacgacatcgccgagacgcttacgttttctacgcaaaatagctttaatttggcttatctctcatccttttttgcttatctctcattccctttccttgcgtaagtaggtaaacagactaccctttgagggttaatatctcatatatcagtttcaaataacaggtactttgtagctcggataccttatatctttgttatatcaagcctatatacttctgttttcttaccgacatcttcatcgttccacccgggtgaaacgatcttgccactagagtggagagatctgttcactctagtgatgagatcagatcactcgagtggaacgatgaagatctcctattaaaaatctgataacaataggtgaaaagcacgacaggatagggtcttctgcataagagaaagcggtatatctcgtctattccatcatttctctgcctacaacgtttatgagctttaagtcatagttatcatcgtgggcatcttggaataattgccagatcatcacgccggcataatcgttttctttgatgaacttacatttgttggctatagtagggcggccgttataataagtcttgcctatattatccttgtccgctgcttcatttccaagatgtttgagtatgccgctataacggattccacgaacggcatccactgcgccttgcagactttcctcccaggaatatccataaaaaggaagtcctcccactattttacttttggctgcacggcattgttcattccagtatttgaggtctttcacaaagtcatcatatgaagcatgctggaccggtttgtcggtaaatgctccccggtcataactcatcaggttgatatagtcgaagtattgctcccattcggttccgtaattaagccagcggctgttgacggcacaggtcatcagcatatttttctcttttgccaggtataaacctctggcaaaaaccaataatgaggggaaattcttatcccagttgtcatattcctcataatcgatgtcgaagccgtccagtttatattctttagtgaatgcaataatctgctgtatcagttcttttctggctttcggatcattgatggcggtagtgaattctcccggactgttctttgccaaagatatcagaatcttgacattatgcttgtgagccgtttcacgtacactttcaattctcttccggacaggttcgatgttgagtgtgccgtctgcttttacccttgcaaagctggcattgatatgcgtcagatacttccattctatcgtaggaaataaattttcaaactcccagtcgtcaagcgcaaggtagccgataactactttctgggtgacttccggttggggctgaggctgcggttgaggcacattgggcacctgtgggttgttggtattagaagagggtccgcaactagtgaataaaatgcttacagctgttaataatgcgtataatacatgtttcataatgaattgatattaagtgaataatgttttttacgagtttataaccaaatgacttttccatcttcataaaggaagattctatgatgttcttgagtatttttactgcagtgacttaatttcaataatgcctttcgagggacattgttgaatataagatagctgccattcccttctttgcgttcaattgtacgccattcattttcccaatatgataattcatatgtgttcgatttgccaagccatgatcttatatagggacttattcctatagcagataatttgtattcattatttaaatcaaaatcaatatatcctttggaggcttctccgctgaaggcggtatcgctcaatccgtcaattagcatttccggtttttcatcttcgttgttatgcggcaaaggagacaggatttgaatgccggtgatcagtttgtctgcactataaaatgaaagttctcctagagcaatgccgggcgatggtaaataaagccggacaaatcgataagacatcgggtcgtctattctgaaaagttgatgttgtatctgtaatgtatcattgatggtatacaatagtttatcttttttcccatttttcattccccaaagttcgcttccttttaatgaagtcaggttcttcctgttctcgttgaacggcacttggcccgcaaaattgcgaattacgacttgccccttttctccgttggcagacagattttgcagggtaccgtcggattttaaccagaatggttgtcctgccggtatgcttttcccttttgcataataagtaggaaggtatacaatatcttttcccattttgtcgaatgttacttgttgcccttttatcttgccccactgaacaggaatccagtcttgatagttgtaaactgataaataagcataaccggggatcggattaatagaatctgtattcaataccactcgtacatcttgagtttcaaaatattcagaagatacatctttcttcttttcattcagaaatagaggtggaatatcctcacgtgtaactttctcatcggataatggaccttccatatgattggagaaagtcttgcgatagactttgggcagtctgaacttcccccaaaagctatcgtatgatttgttattataaatacgtttatatttccaacggtcgtcatcccagaatgcttcaaaagcataagactctccgtttacaataatcacgttccagctgtgccctccgttgcgattgccccatacgggaacgaaatctacggcggcggccattcctactgatgaaagtagcaaggagttgaaccagcatcgctgttcgcatgtaccggtttttatcttttcgaatgtagatgcagttaatattgggatgaatggaacatagtagggagaatgaacgatatctttataaagaaacaataaagagtcggtcttctccatgacgttctttccatgtgttgcataaaagtctttatgatggcgttgataatatctatctcttgaattgtcgattaccaatccgttttctctccggtatggcaagatgtattcacaaaactcatgaaaggaacaattttgcgtatatacgttccctttccatgctttgaatgccatttcaatttcagagataatagttgaggcttttaagtgctctgcatcgttcctgttttttgccatcaattcatctgagtatacaaagcagaacacttgccataaactgtcaatttcttctccgcatttcttatttatttcataattgtatttctttctgacattgtcgtatatcttgtaaaaaggagcatatacagtttgcaagttggagtcattggcgtatgatccctgcatgttggagattagaaacttggcagcttctagcttcaacgagtcgtttgcgtaatgttttaaaaccttttgcagttccgaacggttttctttggcggatgacaacgttttgtctaaagcacttttttgagtgcaagaaactagtagaagcattccggagatatataaataatttaaccatttctttttcatcatcctatcttttaaggtctatttccaataaaatgtatactccttttcgtagagttctctattccgttttccattgtcatttcttttaaaggtccagctataaatgacacaatgtaattgtattttatatattgaatccaagtcttttacatatcctcctttttgcagttctgataagttaacgtcgattgttttcgtttcttccggaataaaattaagatatgttttaattgaatgataaggatgtctactatagcctatctttttattattcttatcataaatgttcaaatcataaaagcttcctgtatcacttccatcattcgtttgagaatgccggagaatagcttcaagattcttatcgttgtttttgaaagtaaatgtcaggtatttcttttctttgtcaaatgtaacatcgaggctcatttgacgttgttgacacattattggtaacattgtaattagtaatactgttgtaataattgttttcattgtatttatatgtgctgattgtcgaaattttaatatctataataagagactattctatcttagaataacctcttattatagaaactgcttttatcaccattaaagctaaagataggctatttaggttctattgcccaccattggtatacataattcaatgttttagctaagggggttaatgtaaactttagaccaatcaatttggtctctatttcacgataaacggatacaggtatagtagcataaggtgtgaaaccgggaaaattgaaaagaacttcgcttatttttcctgtttcagaatcggtacaagtaattattgtaagtttcgatcctttcatctttcctttatagtcagcaaaagcattattaacgatcactttgaaaatggaatcattataagcctcgttcttatctttaacatataagggactatagttttccggtgttacataaaatggagtattagtcccttttttcatttggtctacatatgtccatttattgttcttattatataatgtaacatatcttcctccacttacatcacattgataagtatatccctgttcgttaaaagttttagttactgcataataattagtggtttgcgctaaagcaaacactatgttaaataaaaaactgattaatgttaatatcttcttcataatatttacctgtgttatttatatagattttgtaaattcttaaaattatctgaccctttcctactgttaagccatggataatctacactatcataacctacgttccggaaatcttcgatgcacttcggatttagtattttctgtaggtcttcttcagttaccccaggccgtaaatagccaaactcatcaatatattcctccaaaagacgtgttgcattccatctagagtcattcttgcttttttcgtaccaccaagtcctttcgctttcctccaaactatttatatatatttgctgaatgagatgtgcttcgaattctcgattcaactgcgttgcattccatgtttcttgctctgtatatgattggagagcatgaaccatctcatgcaaaagagtactgctagttatattcattctcattttaatacctcctaaaccaggatcgaaattactattcatattgtcacttacaaattgaataatcaaagtttttcccttgagtgcttcttgtaatttgtgatataaagcttcaccaatcttggtcttagtcattttattaagtagattctcaattgttttccagctattatctgtcatattggaattacgaaatatcgcttttgctttaggagccactggttgataccctcctccaacgccaccaccactatctacttctggaggaaaccatgtatgggcattaccattttcatcatggtatatgttgttgcatactaatttggtttcatattttgttcgagtacggcactcgataccgaagccgattccgtattcaggatcttcataaataaatggtgtacattcatcatattcaacaaagacactttcataatgacattctgaactttcgctacgtgtatccgcagtagcttgcatttttagcccttcttctgtcccctggctaatcgttgctacgatttttccattttcatattgccaaccattaactaagccaccttccggttcatagaagtaaacactgccgcttagatcgggagcccggtacaagtaactattgtcttcaaaatgttttgctttcataagatagtcataggtgcctacgatatgcatcacaaaattgatgatttcccctgtttccagattcttgatgatcaccattcgggatatgtttcgtatctttccgcgctctgtgtccttacatttttccatggtttcactatccatcaagactgcgcctcctcttgtcagtagaggaacttccactacttcaaactttccttttcgattttcgtagcccttcttccaatgcagcttagtcattaactcgaaatgagtagcaacagagcgggtagtaactacaggtgtctgatgagcttcgtaccaactccgtgccatatctatgctcagctcacggtttttacctttaataatgtttcctgtcgtttcctgtgagtccagatctgtttcgtcctgtaagcaggaatacagcatcagaccaaaggcaagaagtccgacaaagtaacaaacaggtcgtttgattctttttgttttcatgttcttagattctagtgaataattattttagttgatcttcgaaaatccttcgtaattctctatgcatctcataggtttcaaaaccgtatacttttacttttttgattaaggtgtctcattggcgcagtttcttttatttcacttcatgcctccagcctaaaaatatgtaattatatttggcgccttcctttgtaggtgtaaaccagatattttttttcaattctgcctctatattgtgatatacagaaacaggaattgttgcataaggaccaaaagatacaaattgatattctacttctgcaattttaccatcatctggattgatatataaaataatcgtcaacgctttacctttgaccctctgtttctctatacttgagaaagcattattaatgatggaaaaacatttaggtttagtccatgtttctctttcaatatgctcttcattttcttcggctatagttattgttttatctgtactcttattgatttgatctgcataagtaaacttatttttcttgttgtaaagccttacgaatttggctttgtcaagtacatcacattgataagtgtaaccctgctcattaaaagtcttagtagttgtataataatttgtttgagcaaatgcatgtatcatacaaaatagtatactgattaatgttattatgatattctccatgataatatgtacttataatgaactatatatacaaatatgtcttttagtcatttcaacccaatatgagtattaattcaaatcctaataatctattcataactaagttgttataataggttatactgtaatagaataacctttcattactaaaaatggattactgtttatattgcctctcaaatcaaaaagatatccatattactacttccaataaaatgtataatccttctcgtaaagttctttatttcgttttccattatcatctcttttaaaagtccaactataaactacacaatgtaattgtatcttatatattgaatccaagtcttttacgtatccccctttttttagctctaataaattgatattactttttttagtttctcccgggaggaaattaagatataactctgttggatgatacatacatctactatagcctatctttttattattcttatcataaatgtttaaatcataaaagcttcctgtatcacttccatcattcgtttgagaatgccggagaatagcttcaagattcttatcgttgtttttgaaagtaaatgtcaggcatttcttttctttgtcaaatgtaacatcgaggctcatttgacgctgttgacacattattggtaacattgtaattagtaatactgttgtaataattgttttcattgtatttatatgtgctgattgtcgaaattttaatatctataataagagactattctatcttagaataacctcttattatagaaactgcttttatcaacattaaagctaaagataggctatttaggttctattggccaccattggtatacatagttcaatgttttagccaagggggttaatgtatactttagaccaatcaacttgatctctatttcacgataaatggatacaggtatagtagcataaggtgtgaaaccagcaaaattgaaaagaacttcgcttatttttcctgtttcagagtcagtacaagtaattatgatcagttcgaatcctttcatctttcctttatagtcagcaaaagcattattaacgatcactttgaaaatggaatcattataagcctcattcttatctttaacatataagggactatagttttctggagttacataaaatggggtatttgtgcctttcttcatttgttttatgtatgtccatttattattcttgttatacaaatttatatccccgctctcagtatctacatcgcattgatagatgtatccctgctcgttaaaagttttagttgttgtataataatttgtttgagcaatagccaatgaaacattatacaataggctgattaatataaatatatttttcatatttctttgtttattattgatacaaacttcttaaattgttgaaattatctaatccttttctgctattaagccaaggataatcaatattatcataccccacgtctctgaagtcacttataattttaggaattattttttgcaattttccagcagttatccctggtcgtaaattgccaaactcatcgatatatcttaccaaaagacgtgttgcattccatctagagtcattcttgcttttttcgtaccaccaagtcctttcgcttgcctccaaactatttatatatatttgctgaatgagatgtgcttcgaattctcgattcaactgcgttgcattccatgtttcttgctctgtatatgattggagagcatgaaccatctcatgcaaaagagcactgctagttatatccattctcattttaatacctcctaaaccaggatcgaaattactattcatattgtcactaataaattgaataatcaaagtttttcccttgagtgcttcttgtaatttgtgatataaagcttcaccaatcttggtcttagtcattttattaagtagattctcaattgttttccagctattatctgtcatattggaattacgaaatatcgcttttgctttaggagccactggttgataccctcctccaacgccaccaccgccatctacttctggagggaaccatgtatgggcattaccatctttatcatagtatatgttgttgcatactaatttggtttcatattttgttcgagtacggcactcgataccgaagccgattccgtattcaggatcttcataaataaatggtgtacattcatcatattcaacaaagacactttcataatgacattctgagctttcgctacgtgtatccgcagtagcttgcatttttagcccttcttctgtcccctggctaatcgttgctacgatttttccattttcatattgccaaccattaactaagccaccttccggttcatagaagtaaacactgccgcttagatcaggagcacgatacaagtaactattatcttcaaagtgtttagctttcataagatagtcataagtacctacgatatgcatcacaaaattgatgatttctcctgtttccagattcttgatgatcaccattcgggatatgtttcgtatctttccgcgctctgtgtccttacatttttccatggtttcactatccatcaagactgcgcctcctcttgtcagtagaggaacttccactacttcaaactttccttttcgattttcgtagcccttcttccaatgcagcttagtcattaactcgaaatgagtagcaacagagcgggtagtaactacaggtgtctgatgagcttcgtaccaactccgtgctacatctatactcagctcacggtttttacctttaataatttttcctgtcgtttcttgtgagtccagatctgtttcgtcctgtaagcaggaatacagaatcagaccaaaggcaagaagtccgacaaggtaacaaactggtcgtttgattctttttgttttcatgttcttagattctagtgaataattattttagttgatcttcgaaaatccttcgtaattctctatgcatctcataggtttcaaaaccgtatacttttactttttcggtaagcacttcattggctagtcggtttgcttcagagatacgcttttgttgatagtacatgagagctaacttgtatcgtgctttctgtcgggaggggaccataaagtgagccgtccaataagcagcctcagcctcttttattttgtctgtacgttgtagagcgtcgcctttaagaatataggtatgtgtgcttggatataattgttcccaataagtaatcttatccggtaagatgctgtctctctgtaatttgtaaagagtgtgacaatagtatggccaaaatattgtttcattcttcattgctgtttccagtagtgaaaggttcgtcataatttcttccggtgattgattggaagtacgatgggaaatttgatataattcccggtggcattgaaacgtttttattagtagagatccctgtcctgctatggcaaggaaaatgactgctttcagaaatatgtatttgtgaggaagttgtttaattacacattctctttgtctgttggacatttctgccagtgctatagtcataacagccagaatcgggaaagtctggtcgggataagaaaataatccccagataagtccggctatgtatatcgcttgggcggataaagattgtatctctcttttcttatatgagaaaatgcaatataatattccaatataaagtagcaatcctgccactccatattctactgtccagcgcaaaggttcgttgtagacataatgattattatctgccaactgtttttcatatatgtttccttcttttttcagatattcaccttgataatgcatatagttggcagtaaagccatgaggaccaaagccggtaaaaggcttctcttttatcatttgtgcggtaactttccagatcagtattcttccatcagctgaggccagtttgaactgatatagcaagcacgaaagtagcgcaattgtaatcaaggttgatataccccatcgaaaagagattgaaaagcgactataaatggaatagctgatgatagctaatactgctatccaggcggaacgacagtgagtaagccacaatatgggcagagctataatacacgtaagaaaactcactaaataagtatatctatggattgcatctgacttgaaatgcgataataccattatcggagcactcagtaacaagcataatattccggcataaattgtagggttgccataaggacctgttatatcaaaatgaggatgatgggagggaagtatatgcagtatctgcatataaccgataattgacaggactaaggtagttatgaggatgatagtatataagagagtgccatttaatcctcctgtctgacgtatgctccaatatagtatgatcagagcaaaacgggctaacccgaaaaggttagaggtaggaggataaaagtatatgttccccaccgctattaaaataactaataagtctataatagttagtcggtgaatgaattgtttagtgggatagaaagctgcaatacctattactgtcgctaggaatgtacaggtaaacaagaatgattgatgaggaacatcaggtatttcttttatcggattgaataataagcctaataaaaggaatccgataagtaaggatactatattttttctggttattgccatctttgtttttaggcttgattttcattatagtatattaaatacttcctaataatggaattggtgtcaataaagcgaaaagaggagactatataaacctcctcttttctttagaagttcctaaaaaccttggctcctaccttaaaacctatttatctaacttggttattttcacccagtcaatttccatgatggcaggtaagttggcatcatcgataggacctgcccatgagcccggtctgtctcctcctagtcccatgttcaggatgagatagaatgaagaatcttttgtgaacggccattgcttcatttctgcttcattctccagtttcaggtttgaataagagaaagtctcctgtccattgacaaagaaagtcagtttgtcttcgctccattctaaagcgtagatgttccagtcctgataattgcaagttacttgtgcggtgttggacggatctttgatgttcaaatcatacgtgtagtgagtatgtatcgtatgatggattacggattcttgttttacatgttccatgatatcgatttctccgcaattcggccatccgtcatagatatacttcttcggcatcatccagatagcggggaatgcaccgttggggtaactggtgattttggcttttatttctacccgtccgaaggtgaagtcaaacttgccttgtgtctcgatacctccggctttgtattcgtcgcctattttttcagctttgagtatcagtctgccgtcttttacgtaagcctggtcatagctttcggacatttcgtcgttccagtcggaacctgctttctggcagagtacccatttggtcgggtccggattgccgtccacgtcaaactcgtccatgaagagaacgtccttcatggtgtcgtcaaacttggtcagtacgatagtataggtcgttgtttgattgtcttcggtggtgacggttactgtctgttcttttttccagttgtgtacaaatgttgccgggtccggtgagatggtggctccgtcgctcattagcgtatagtctacgccggtgatggtattggcatcctcgatcgtaccgatttccactctgtgggttgtctggtctattttcccatgataataggaagtcgtattcgctgacacattatttactgctacggcaaaagcggtgagcggatatttcttttccggagtgatgtaattggtctcatcatccgaacaggcagcagtggaaaatccgatgattgccatattcagtataagtaatatttttcttttcatcatactcttttctttttattgatttttgagtttgttagaagcgattgcctgattgagggagttcaggcaatcactatctttagagaattagtctccccatactagtggagcgatgtattcccatttagtcagtgtggcactgccgccggaaattgtcatcgagaaattaccaccatctttggtatccgagaatggtactttgtaagtatcacttgtaccgttagcgtctatcacaccgtcgctggttgcttttcctatgactgtaccgttgagaatccattccgagtaaatccatgattgagttggatcattggcatctatagcttcgcgtatctcgaatgataatacgtttggcttgctggtatctacatcacggccgctgttctcattgtatacgtcaccgttccacggtcttgtacttaattgagtccgtttgctcagaatatggaagcgaagttctacgtctcctccgtcaaatgcttttccgctccaagagaagaaagtagtcagactggcgtcgccaagcggttcccaatagaagctgtaatgacccggcattaaaccacccggtccgtagtaagcaccgctgatggatctgtttacttcagtaaccacaggtctttgtggattcgcttgtttaatcttgattgtcttcataagcggagtagcgccttcggcagctttggtgctcagtacgataattccggtacggacagaagagccttcgtgtgcgtctacgttaatcacgatgtcggcagaactgtcgaatgaagtcttttcgaagtgataccaggtatcatccgcttcgttttctttggatacttcccattctgcattcgattctacgtggatggtgagttgctgagcctgttcatacatagcaaaccacttaccgttttccggtgtatctggtgtcagcaatacaccgtcttgtatacattgtacttctctggctattttcccgtgtcggtcatagatggttacaataccggtacgttgttcgcctgtattcggtgaagcggtgacagtaatttctccgttcatttcgcccgatgctccggattggatggagagccaaacatcaccgtctgttactttagcagtccatttctgattgctgagtacgctgaatgtttcgctgtttccttcctggtcgatcatatccacgccttctacattcaggtaagcagtacctttctgggtcagaacgaatctttttccggtccagtagtcacttttaatgttgagtgtgtctatacggtcgtccaattcagtgttttctttgcaggtaacagttacggtgtaggtctcacctgcctcacccgtactgggtgagatggtgtaccaatcatattttccgaatacttcccacgggtcagttgacttgacctggaaggagactggttccggatttttcgcttcaaccagataggagtcttctactctatagcgcaggtctacccatttctctgcttcactgtcatcgcagccctgcaataaagagaatgcaggtagcaatgtggcaagagaaatgcctgtaattattgattttctgatatttaatctcatactcttgaattttagggttcggttattattctactggttcccatgtgatagacttcacggtgaaattggaagctttatttgtggtatgcatcctgaagtatacaggtgctcccggttcggttgcataaggatcggttatgttattatctaatacggcaacctcaacaccatcaataatcagtttaagaactaatgcgttcgaaccttcttctttgttgacaacaaggaattcaatcttcttcactacattcgtttgttccgatgtccaggtaaatgttttctgagtccagtttaagcctgaacctccacaagtgaagttactttctttatttgcgtagaaatgcaaatggaagtttgtatttcctgagttgggccacatattaaactcaatccaatcttctccggttaaattgatagattcgaaatcgaatgcgagacgtccttttttgaataaatagttggtgactattccactgccatagagtgtcatgtaaccggtttcctcatccacaacatagttatctgctcctccttctttccagaaagcagtaccttgactgatgtcgaacgtaatgccgtcaaatccgtcgatgacttctttggtcttcataatgatgtggccgacacggtttaccatcagattattagtcgttgttgtcgttactttcaactctgtttcactcagtgcctcagctttcagccaactctgatattccttaggaacttcaactttccattctttgtttgcgcgaatcagtacagtcttttccataccactgcctgttccgggcatgctgattgttgtactttcgggatcttcttccagttcaatgatcactccattctgagtaatggtaaaggtgtattcttcaaactctgtttttacagtcagcgtgcctgctctcttggcacctgcattggcgggcagtgtcacagttacggtttctgctatggcatcttcattacctgtaccgtatgttttgtcgatattggaaaggaaagcggtggaaggaatgatttcccaagctttgttggaagcaatggtaaaggtgatgctgccgccttctgtcggtaccagttcatcgtaaggaaccaccaccaagtcttctttcgaagcctgctcgatagtaactaccttggtgccttcaacgccttctgccttgatagtcagtttggctgtacgtgctttctttcctgtattgttttccattgtcaccacaatctccgacaccagtgaactggctgcactcatcgaaggagtcggcttgcaccactgctggtcgctttcgatcgtccatggagtgttggagctgatattgaacactacattgcttggagaagttgccaaagcagtgtaagactctagagcatctatctggatattgagaggaccttccggctgtgagtcgatgtcaaactcctggcatgctacaaaactgaatgtgcacagtgcaagaatcagttgcattaacgtgttgctatataactttttcatatatcttttaaatattagattagacaattaattaccatcctgtgttttgaggatttaagtttgtattcttgtatagttcgctttgagggatcggatacagatacatgcaatctctccagttacgggtttcgtaaaggttcttgtagaagttgaacgtaccgtccgcctgcttctcgatctttactccgtatagttcccgctgggtagtatcggcaatcttccatctccgtacatcccagaaacgatgatcttcgaaagcaaactctacacgccattcattgtacaggcgttcaaggaaatcttcttttcccatggaaggaatcaacggcatatcggcattctttctcactttattgatagcccacagagcagaatacttataagtctcatctgtgtaattgacatcattgaaagcgttgaccatagattccgcatacgttagcaatgtttccgcatagcggtaaatcacccaatgatgcttgctgacagcttctttacccggttcgaagctggtagcttcctgaatgtatttgcgcaggaagtatcctgtcggtgaaccgccttgtgatacgattccgtcgtcggcgccacctttgaaggtttcaatggtgtagtctttaaacgacattccgttagcaagaatagcgcggtagaaacgtttgtcacgattctcataaggtgattgcgggtcaaatgcagggtcttcgcaaacccatcctgtgttttctagggttactttgtaaccgttgactgtctcgaatgcgtccacaaggttttgtgatgggtaattgctgtatgggataagactggaagtgcgtatccccgcagtcatgcgaagcgggaagttaaacatttcgaagttcgaatcatcaccattgatcctcatcagtacaacttcttttgagtcgaggttgttggcactctcctgggggtcgagagagtaaagccctgtgttgataatatctattgctgctttggcagactttttccacaattcggtatccatagaaggattgtgtagcttactggcagcatatagcagtgcttttgactttactgccattgcaaagcctttggtcactctgccgatttccgctcccggttcgtttacatagctgtccggcaagttattggcagcgtcgtcgcattcactgacaatgaagctgattacttcgctgaatggtgtcttgccgattgtattggcttcctcctcagtcagtacttccaatggcatggcgatgtcaccgtagcggcgtgccagttcaaagaagtagtgtgcccgcagcactctggcttcgtaagggaaatatttcagctgcttcatccagtttgtatattgtccgtcgtgctcatagcgtgtgaagtccacttgggcaatctctgctataaaactgttggcggcacgtataccacgatacagggtccatgaatcgtcataagttttaataggcgaccagttaccgttattggtattctggatattatctgcataggctccgaactcgccgtcatcactggcgcagtcgcgcatggaatacatgtcttcggtgaagattccaccggaggtcgcaaacagttggcagccttgtggcatataggagtatacgtgggtaagcattgatttgcttgtaccgaaatacttgtacatgtcttcttttgtcttcaggttgttcgtttcatcaaagtcaaggtagttgcacgaagcaaagaccaacgaagacaaaatggttaagagtatgtatttggttctcataatgttcatttgttactttgcattaaaaattaagtttgatacctgcccaataacttcttgtcgacggataagcgatgccaagttgttccgggtcggcaaaatggagattgtctaatgagaacagattggtgccttgtacgaatactttcaggtcggcaaaacgagtctgcgatttcgggaaagtataagctaccaataggttacgcagtttcaggaatgaaccgtcacggtaccacagtgagctggcgcgatagttgttcagattttcctgcgtagtcagtctcggcatggttgcattggctttattctccggtgtccagcttatttcttcattcaggaatgtattcgagatgtttccattgcttgcaagtggaatgtaaagcggactgttgagcaatgaaacagtgactcctgtcattccctggaaatcagcagaaagttccagtctcttgtacgagaagttcaggttgaatccgaaatagaagcgtggaacagatgaaccgaacattttcacaacgtctttctcgtcgatgcggttgtcaccgttctgatctttgtatttcacgtcaccgggagctacgtcagagaaggtttgttgcggactgttgttgatttcctgctggctgttgaagaagccgatagcttccagaccgtacatctgtccgatacgattacctttggtgtacaagtagtcgtattcctgatatgcctggtttacattgactacctctgagttcagatatgacatacttgcgccaacaccataatggaaatcaccgatcttatcattccaactcaaagaagcatctagtcctttgtatttatagattccttcgttcacctgacctactgtgataccgataataccggaagtagaattggcacctgacacaagtatatccgaacgtttttcgtagaaaccttctactgttgcattcaaacgattatcaaaagcggcgagatcaaatccgaaagtcgctttctgtgatttttccgctaccagaccgataaccggcaaatcgccttcactgccaccggactgtcctccggcattcactccgaagttataaccggcactgccgctgccataagactgacgccataattcgtggctcagattgccgtcccatccagacagaccgtaagaggcgcgaatcttgaagagattgatcggtgtcaccttttccataaatgcttcgttggaaacgatccatgcagcggaaacggcaggatagttggagtatttgtttccgtcgggcaggtaagctgatcccgaacggttgaatacggcattgaggctgtaacggttgtcgtaagtatatgtggcgttcaccagcacagactgattcttctgagagttgtttctgccgtttctgacaacagactgcatatcataaatcaatgctcctcccacctggtgtttgccaaaagtgcggttataatccacttttgcctggaaatcgctgcgtagcatcagtctttcgaaaggctggttgtgtcccagtgtttcggagtctgtaccataaatggcaggagttgttaccagtgtaccatcactggtgatacttgcgttgctgttcatgtaacggtactctttactggtggtttcattcattcctccgatattatcgaaagagacggatgcttcggctgccagccctttggtcaacgcacccaaatcctgacggatactcaggtcggcgagtagtgttccgtagacgttacggatgtgtccgtagtctttcaacagagctaccggattaccggttccgtacacagagctacctccataaatgccattctcataacgaatggggaatgcagcggatggaatgccatagattctgttgaaaatagcgctgcgtccatagcgggtacctctgaattctttcagtctgcctacgatgccggctttcaataaggtactttccgtcacttttacgtccagattggtacgcacggtcagacgtgtgtctgtcggagtagtgtcgaaacgtgtatcttccgtgttcttctttagcatagaacgatcccggtagtagtctactaccgtgtaaaaacggaacttatcactacctccgctgaaagacattttcaggttgtgtgtgaatccggtgtcgttcagtgtttcattccaccaatctacattcggataatcatacggatagatccctgtccggaaagcattcagttcctgtgcattgtagcgtgcaggcagaccgtctccgcttaatgctgtattgagggaattcgcgtacgtataggcatctgcaaagtccggagagcggaattgggtattgacaccgaaattatagtccacatttaccttcaggccattgcttattccgcgtttggtcgtgatcagtactactccattcgcaccacgcataccgtagagagctgctgccgccgcatctttcagaacgtagcatgattcgatttccatcgaagtgatgtcactgatatcacgtgggaaaccatcaattaatactagcggggcatttccgtgtatagagagggtggatacgttatcggctgacgagcctgtaccctgatatacattcagacctgctacttttccatacaaagctttgctgatatctatgtacggggatttttcgaatgcggaagcattgactccgttgatagagtaactgctggtccgggaagatacgttcatctggtagccgatgctcagtgtatctgccagctgcatttccgaagcagctttcgatgtctgtgcattcagggataccgaacctcccaggagcagagtgattaatatataatttattttattcattgttcaaacgatattagttaacgtgtcatttaccagcccgggttttgggtcattccatattgcttgttgatttcctcctgaggaatcggagccagataccacttggtatcccagttggtagcccagtaatggtctcccagttcgatcttctcgaaggtgaactctgtcggattgttcaggtcgttacctctgcttctgagtccgtacaacttcttcttgaagtcgctctgacggtctctgcgaacgaggtcgaaccagcgtacttcttcaaatcctaattcgagtgctctttctctcagtacggcttcgaggaactgatcgtgattcatcgtcttggaaagttccggcagacctactctctttcgtacatcgtttaccattttgtaagcttcgtcggtagggcgtccgttgacttcgttgagtacttccgcatatcccagcatgatttccgccagacgggtgtgtgaccattgtaccggaccttcgcggtcgttgttctcctgtaagatgtacttcatgatcaggaatccgctaccgtctttgtagtcggcgtggttgatataaacaggagcggttgttccgttacagtaggtgtctccggggcaagctacattttcatacagacgcgggtcgcgggtgggcaccatttcgccttttgtaaagaacggttgcttggagggtgacttccagtcgaaatttgccggaaaatcagttccgtcttcccacggaaacatatctacatagttcaatgtagggccgctgtaataacgttgaccaataaaactctcgtgaacaccggaaccatatcccttgcgggtggagattagtatttctgttccgccacggttgtaataggcctgacgataggccagacgtcttgcccggtgcgtttcttccgtaggttgaatcagttcgtattcaccccgtctctgtacttccgtgaagaaggctgcacctgcttcggcggcatctttccagcgttggtcgctgtagtttccgtaacaggtatattcgtctgcttccggatgccatttggtgttggagttgaaagtcggactggctgcccattgcagtaccttgaactttaatgccatcgcacctgcgagggtcatacgtccgtcatctgctttctccgctttccaagccaggttggagttgatcgcttcgttgagcaatccaacgatcttctctaccgtctcggcaaaagtgatacgggggaaattcattgtctcgtttacgtctacatagtggtccagccatgtcacaccgcctacgtatctcagcatttcgaaatagcagagggagatcaaaactttggcttccgcaattcgttcgcttttttcactggctgtcatgtcgggcactttttctacgttctcaatatacaaccaggcataacggatcgtagtccagtcggatttgcttccataacggtaagcggaatttttggggacattgttggcgctgagtgctccgttgtaatagagcttgacaggaccgtcactgatattatcacggaaactatagcataagtctgtgattgattcaaggatgttcacacccaatttaaagtcggaaccggtcggcaatccgtagggtagtccggtgtatgcttgggtcagcaccttttcggcatttattttcgaagagaacatttcttcggtagtcgctccggaactctcaggctggtcgcccagaaatttatccccgaagctgatttcagaacaggaggaggctatcagtacgcaacctaatgctattccgagtccttttattattctattcatacagtcgttttttagaagttaagatttaaaccgaagctatatactttgatcagcggataatctccgaaccggttaggatcactttccggatcaagatatttaagcggtgagaaggtcagcaggttgtagccgctgaagtttaatccgagtgagctgaggcccagtttcttcaggaatttctttccggtgatggtataaccgaagctcagactcttcaaacggagataggaagcatctaccaaccagagggtagaaggttcggagttccagctttccgattcttccgacgggcgcggataagtagctcccagttggttgtccggagtccagcaaccgtcgtagaagtaggtcagcaaaccacgctttccggcatttgtataggggatacggtattcgatgtcatacattctgttaacgttcttggaacctacccattgcatggtgaagttgaatcctttccagtcgaatcccatgttcataccgaaaacgtattccggacgggtagcataacctgctacgctcttgtcattaccgtccacgatatggtctccattgaggtcggcgtacatggcgtcacccggatataccttctgataaggctgaggcaattccggctttaaggtcagttcgccgtcggctccggtgatgaagtcgctgtactgatagagacggatatagttgtatactccggtctgacgtccggtagagccaccggtctggttcatataagagaattgcttgggcacttcgtccatatagaggattttgttgcgtgcgaaagatacgttggcatccacataataattgaagtcttttccgatcttatcgcgccagccaagagaaacttcgtaaccgtggttgtctaccttaccaatgttcaggttaggcagtgcggttgcgatgatgcttggagtcgattcaggagagatcagaatgcctgtgcggtgttcgataaagtagtcgaaggtagcggacaggcggctgttgaagaatttaaggtcgataccgtagttctgcttgtcggctgtttcccaggttactgccggattacccatacgtgagatggctgctgccgattgggaaatcggattgtccacaccgaagctgtagctgcccgatgatccccatacggcaggcatgtacataaagcgtgagtctacacccttgtcattacctacacgtccccaggatgctctgagtttcaggtagtctacgattttctggttttccataaacttctcggcagttgcgatccagccggcagagaaggaagggaatacaccgaaacgtgtgctgcccggagcaaagttctccgaaccgttgtagccgacgtttacgtcgagcagatatttgctttgataggcataagtagcgcgtcctaccagtcctacgtagttacggggcagataagtgtagctgtccggataataattacgcgactgattgtaaaggaacagaccggatattctgtggtcgccgaatgtacggtcatagttgatacgtccctccagataccagttctgtccgcgcccgctgctttccgaataagtgagcggagtatcgctgccgctgggtacatagataagtgacttatcgtagtcgggatcggtctgtgacatcgtaccgttggtgtcaaagtatgatttgtagtacacggtctgcgcttcgatggcgcctcccgtacgtactttttccagtttgaacttattgtcgtaagcacctttcacggaaacactcagtcccggagtgataaagtccagtttctgtgtgatgtccaaatccagattcaatgtcgtgtcatacgtctgattataaccttgtccgtagaaaacgaacataccgtcacgcattacctctcccaagggaaccatgtctttgggaactagtgtacgtactccgttgataaatcccggtccggcaaacgggtgtgaccagatttgtgcgattacccaggggttttggtcttcgcctgtgcccgaaacgacgctgcgcggttcctgtatcttgcctaaaacaccaccgacaccgagtttcatcgaagtagtcttggtcagattggcatcgatattggcacggtaattatagcggttgtaacgatagttattgtcgtacatctgtccgggaagttctttcagaagtccgttctgataagtataacctactgagataaagtatcgtacattttcgctaccaccggagatattgaggttattctggctttgaagataaacattattaaagatatacttcttccagtccatactgggatacatgatcgggtctgagccggtacgataggcttctacctgttccggggtgaagtataatttaggattcgttacgtggtccatctcctgcttcatgttccagaagcgtgcgaactcgtaacttccagtctgttctaccagtgagatgggctgttgcagacccagtttggtgctggcggaaatctgcgttttgccagctttacctcttcgggtggtgatcagtactacgccattagcacctcttactccgaatacagcggtggaagaggcgtctttcaatacggagatactttcgatttcgttcgggtcgatttgtgaaaactcacgttctattccgtctaccaagaccagtggcttggattgtgaatcgtttaatgaaccgacaccgcgtacatagatggcagcggcatccttaccaggctgtccagtagtctgtacggaagatacacccggcagtgctcctgcaaggaggttcgtgatacttgttgccggagatttgatcagttctttgttgtcgatggaggagacggcactggtaagcatgcgcttgtcctgattaccataggcgatagctacaacttccacttcaccgaggttctgtgcatcttcttttaaggaaacattgatgattgttctgtctccgaccacgatctcctgggttacatacccgataaaggaaatgttcaatacggattttttgcttggggcgacgatcgtaaagttaccgtcaaagtctgtgattgtcccaatgctcgtgcctttcacagtcacattagctccgggaacgccttctttgagtgtttcatccgttactctacccttaattgtgataccttccgggggcaaggcatacatcaacggtatgaataaaagaaacgtaacaagaaagcagaatcttaaattgagcgcgtttctcatactgtttaatttgataggttaataatatatttagtttatagttaggtcaaccgggttgggggtgacttttattctctttattctctcttcagtttctaaatatatcctttgcttatgtgcaataaggttaacttcatttatcttttaatgatgatgcaaaattaggggtgatgtgaaaaatggacgtgcaatattcaccaaattaggtgcacaaatagctagaaacactatctgtaacaaatgggtagaccttgatacaaaattatagacggaatggaaaaggaggctttgtaaggaacaataaaaaagcccatcctgttatgttgcacataggcaataacaggatgggcatctgattggttcttctctttggagaatatgtcttgtctagaagctgaagcttaatcctcccaggaagttaagaccttctgtaggatagcccagataatactggtatttcttattgaggatattattaatccgggcatacacggatactcctttgaacacattatagctggctccggcatgtaggtcgctgactgctgcggctttaatgccttctacctttgtgcgtccgatataatcgtaaccgagattgatattcagtcctgtgatcgggcggaagtctgcgctgaaattaatttcgcaggcgggtttcatatacaggctgtatttttctttcgcatcccagttacggtaagttccagcagcggacaatgcaatgaggtctttgtattcatagctgatcttcataccggcgtagaagttgttggtattgctgaattccagattcagatattgatgtgctgtgaccggagacggagtgttctctccctgaccatcaccatcgggaagtgagggattgttgttgtaatccatttcctcctgcacctcaaagaaatcgtctttcaaatcctgataaccgccatacagattaatccataatccgggataaggactcgctttaaatcctattgctgcattcagctgttcgtacgtatcgagaatagggcctgccggcaaggcataaggacagatcgtttccagtctgcggaaatcgttgaccagcttgcctccggtagcttgcgcatagagtacgtagctgtcggagaagatatactgtgctattacatccggagacacgcggaatgatttaccgctgccgaatgagatatccacattggctcctgcacgcagattccagctgtcgctgctgagtttataatgcggattcagtgccagagcggtacggttctcatatacctggaggtcgtcagcaagtttcaggtctttattgtagatgagattacgcatgtccaatccgatgttgatgctctgttcgtcgctgatagcgccgctgatcaatcctttggtatgcacttgtgtttctccgactttgtcattgaaaaagaaagtgttattgttctgacggttgtacatcatcagattggtttccgcttcgaactgtatgggataattttcatctgtcgattttactcccagatggaagtctcctgaagtaaacttctgcttgccgggctgaaccggagaaaggttgaaattgctgagtccgaaattagcggcgatgttgaaatccaccttattgaactggtggatataatcgatattcgcacgggtacggtaataataagcattccatttcgtgtctgtttccggcatggtcagtttgccatccattccgtccatctgaaagcggacgttcagtttgtccctgtccgacagacggaacaggtaattggcaaggagatccagattaccgtagtttccatatccggcgcgtatatatccgggcttgctgccgggctgcacttccgttcctacatagggacgcatcaggtcggcaggaatggaggtagccgggaagaaagtagtggcatattccacttcctttttgctgacggtaggttcttccactttgggcagcacattcactttggaagcatccagaatgtccggattatattcctgttctacgacgaccgtgcggttcatggtcgtatctttcggctgagtattctgtgcctgaaggttgaacggcatcagaaatgccagtgtaaatcctcctgctatataaagagttcgtttcatacttttcatctttacttgtttagtttctttagtctgtcttcaatcatgctctcgatatcgtcattgccctggtagttctgttgcaggctcagcagatactggcgtgcgtcgaggtctttacccatagcgacatatacgtccgacaggaggacaaagctgcgtgccagccaataagcgtgtggcgtactctgttcgatgtagttgagcagctctttttctgccgctgcatattctttggcatcgtaaagtgcttgggcaacctggtatttagcttcggcaccataagaattgcgggtatccttggccagttcgcggaaatcatccaatgctttcttgtccgctttctgattcttataagcttttgcgcgataataaagagcttcgttttttagttccggactaagcttggcttcagccagcacctcggttgctgcatgaattgtttccacatcgtctctcagcaggaaggcacagcgcaggatgccggtttcggcaagctggcggcgttctacattggtcgctttttctttcagcatcttgtagcttgccagagcttccgccatctgttgctggttgaactgtacttccgcacgcatgatcagcgcttcttctgcgaatggattattcggatattcaagcaattttccggagtggaggagcaccatatcataattcttctgctcgtttccaatctggcagagataataatgtgcattcaggctaaatgctccttccgggaaggtttgcagatatttattaaggctgctcttggcttcttctgttctgccacgtgcataaatcttttcggcagccgcataagtaagcgaatcctgttcgctggcgtcaaagcggatgtgtcccggcatcgcattggctaaagccgcaaattcatcgatacggttcaaatctacatagatagatttcatatcgcgcattgccaggcgggcttcttcgctgcccggatacttctcaatcacttgtttgtacgcattgattgcctggtcgaagttgccgttctgataatacagcaaaccgatttcagccgcagctttccggctgacggggctttcgggatatttctccagcaattccttgaaagaggtaatagcctgaccgttgttatccatcagtacataagaacgtcctttctcgtaaatggcattcacagcatacggagaagaaggatatttgccgaccagtctgttcagaagagtgattttgccggtatagtctttctgtaaaccggataccagtgccagctgatagaaggagtaatcgccggaaggagtattcatttgttcggcttgcgagtagtagtgcttggcttcttcaaagttgcgtacattcagatgacagtctccgatacggttgtaggcatctgcaagcgctgttctgttttcgcctttttccagttggatatacttttggaagtaattgcttgcctgtgtatagtccttacgatggaaagcaatgtatcctaggttgtagttggcgagcgcatacatttcattattgggttgcgtggtcagttgcagataagcgttgaaatcgcgggcggcttccatcatccggttgaggcggtagtaagattctccgcaccagtaataagcgtccgcctttgtctggcggttgtactgcccgatggcgatggactggttcagatattggagagcctgttcaaaattggcattggcaaatgactgtgtacccagttggaagagaatcttttgtttggcttccatgatctgtgcactcggcttggcgatccgttcgattgactttaaagcagcttcgtagctgcgggtattcatataaacttctaccagatagttgcttactttctcggcatacggagaagtcgggaattcattgaggaatttttcaaaagcagtaaccgattcaccgaaagcggagtaggacgtttcgtgcaggcaaagtgcgtagttgtaagcggcctgttccttaatctgcaggttggcgttggaggcggctgcctgttcgaacgccatacgtgccttgtttttttctgccagttgcaggtaagagagtcccatgtgcaggtaagcattctgggtcagtgcgtcgttggcggttgtcacttgtcccagcatttcggctgctttggagtagacttttgtctggtaataggagagtcccagcatataaagtgcatcccggcggggagcagagtgatctctgtccagatagccggtgaatgcttccactgcctggtgatattgtccgaaatggtagtaagcgtctcccagaatgcggtacatctcggcagcgtgctcgttgttcggataggccgacaggtagttttgtgctacgatctgcgccttatcatagttctttttgatagcatagatttctgctatgtagtaaggtacgagttctttgtacttcgggtcgtcctgcaaagggaggaagtctttcaaggcttcatcataacgcttctgagtgtagcggatataagcgagatagtaactgcagtcctttgcatatttgggactgctggcacgtaacgtttcgaaccagatggcggcttctttcagattatcagtcttcatgtagcaggttgccagttggtaggtgcggtcgtcgcgctcctcatttcccagcagatcgagccgggtagaattgaagagtgccagggcctcatcatatttcccttcgtagaagtagcaggaagccagcagtgaatagattcggttggcatagggagtatccggataacggtcgaggtacttgcgcagtaactcgatgcggtttttgtctttcagttcataagccgaactgactaacatatattctgcgtcctgaaggagacttgctgttggcttttgctttacaaatgctttcaatgcaggtatggcagctgcataatttttttcctggaaaagttctttcccttctttataaaggttgacaggagaggttatcttttcgcttgtctgtgcggagatggcaattggtgcacaacacaacaaggtgcagataattcgtgatattcttttcttcataatctagtgttttgacaaaaatacgactatatcttccaacgaaaaccctttgaaagttattttataatcatttaaatctttatgtaaattatctctcatccattttgaatccgaaatacttattctttttggactcttttttatcttcctgatgagagtaattaagtctgatgttgaatttcatgtgattgttgttttataattattggtggttacaaagataatacgaatcttagtattttcctcatttaaaacgttttctgatacccaaaagtttagtgccccttttagttaattgtgttgagccagaaactgtacaagtccccgccgaatggaatccagcccgaaatcttccggacgtatctctgataatggcaggaagaaagaatctgccacgtcatccattgccgagaaatggctcatgtcttttacggtacagagaaagaacatatcgagcgtatgaacgggaaagccagaatagatataaatgttcggcagggagaactgataggtcgctttttctaccttcaatcctgtttcctcccatacttccctgcctactccttcttctcctgtttcgttcatgtcgataaatcctccgggaaggtcgagtgtccctttggccggttctttggcacggcggcagaccagcagttcctttttttcattcagaatcagtgccacggtagcggaagacggattgaaataataaacaaagccgcagtctgtgcatttcttagacttctcgttgttcacttcgaagtgcggagaaccgcattcggggcagtacaggaattgggcaagaggatgtttcatcataactgattttatataatagattgtttgccgacaaaaatataaaatcttttcttcagatatggaataatgtgattacaaaatgctaaataccccgtcttattagtatcattaataacaatcatatacaaattaaaagaatcagactatgaataacaaaatgaatattcctttatcaggaattattcctccgttggtaactcccttgctggacgatgatgtgctggatgtggaaggtttgcaaagattgatcgaacatctgatagcagggggagtacatgctctttttgtgttgggaactaccggtgaatcacagagcctcagttataaattgagggtggaaatgattaaaaatacctgccgtatagcgaaaggacggttgccggtattggtatgtatttccgatacttcgattgtggagagtgtgaaccttgcctgccttgcggcagatcatggagccgatgccgtcgtttccgctcctccttactactttgcgacaggtcagcccgaactgatcgagttttatgagcatctgctgcctcagttgccgttacccttgtttctgtataatatgccgactcatacaaaggtaagctttgcaccggctacgattcggcggatagcggagaatcccggcgtgattggttttaaagacagttcggcaaatacggtttatttccagtcggtgatgtatgccatgaaagataatccggatttctcgatgctggtgggaccggaagaaattatggcggaatccgtactgctgggggctcatggcggcgtaaacggtggtgcgaatatgttccccgaattatatgtaagcttatacaacgctgcgaagaatgcagatatggaagaagtgagacgtttgcaggaaaaagtaatgcaaatcagtgctacgatatatacggtagggcaacatgggtccagttacctgaaaggtctgaaatgtgctctcagtctactcggaatatgcagcgattatgtggctgcgcctttccataagttcgaacaacgggaaagaggaaaaatatggaaagcgcttcaaaatttgggagttgatgtagtgctcaggtaattaatcaagaaaaaatgaacggctatgtctattctcgacattattatctttttattcttcacggggggagttgttgtcttcggctgctctttcttcaacaagaaacgttcgtcggaggaatttacttcggcaggacgttcccttccgggttgggttgtgggaatgtctattttcgcaacgtatgtaagtagtatcagttatctggcttatccgggcaaggcctatatgtccgattggaatgcttttgtattcagcttgtccattccgatagcctcgtattttgctgctaaatactttgtacccttttatcgttctatcggaagcgtatcggcttacagctttctggaagaacgctttggaccctgggcgcgtgtgtatgcgtcatcgtgttatcttttgacgcaggttgcccggatgggttctattctgtatctgctcgcattgcctatgaatgccctgctgggatgggatatcaagatgattatcgcagtaaccagcgttgccattattgcctattcaatgctgggtggtctgaaagctgtgatatggacggaggcgattcaaggatttattctgatcggcggtgcggttgtttgtctttgtgtgctgatgtttaagatgcccgaagggcctgcgcaggtatttcagatagccgttactgaccagaaattcagtttgggaagtttcggcagcagcttgaccgagtctactttttgggtatgccttatttacggtatatttatcaatctacagaattatggtatcgatcagaactacgtacagcgttatctgacggcaaagagtgataaacaggctaagttctccgctctcttcggaggttatttgtttattccggtttctgcggtgttctttatgataggtacggcattgtatgcatattacaagacgtttccggaactgcttccggcaggggtcgagggggatgcggtctttccctattttattgtacatgcgcttccgaccggacttaccggattattgatcgcctccatttttgcggcgggaatgagtacggtggctacaagcattacaagttcggctactatcattctgacggactattatgcccgttatataaataaaaaaccgacagaaaaacaatcggtgagagccttgtatgtttcgaatgtactgatcggaatcatcggtattttcgtagcgctggcatttctgaatgtagagagtgcgctggatgcctggtgggctttgtcctccatcttcagcggtggtatgctgggactcttcctgctggggtatatttcaaagaaggcgcggaatgttgacgccgttttgggagtgatttgtggcattatcgttgtcgtctggatgagcttgtctcctatcttctttaaagatggtttcatgagcgaatatgcaagcccgtttcatgctaacctgaccattgtcttcggaaccatcgttatctttctggcaggctttctcagtatgcgtttgctgaaaacaaagaagtagaagaaggcagcttcactgacaggcatattggtttcatctattatccgatagaattattcgattggactttttttgcaaaggcggggtttccgcctttatctttgcatcagaaacaagaaacaaaacgatgtttctgatgttataagtcaaatcaattaataacaataaaagcaataaagagtatggaaccaattttaaattctcaacttcctgaattcagtgttcaggcttttcaaaacggagctttcaagacagtaaccaacaacgacctgaaaggtaaatgggcaatccttttcttctaccctgctgactttacatttgtatgtccgacagaattggtagacatggctgacaaatatgctcagttccaggaaatgggtgtggaaatctactcggtgagtactgactcgcatttcgtacacaaagcctggcatgatgcttccgaaagtatccgtaagatcaaatacccgatgctggcagacccgacaggcgctttgagccgtgcactgggtgtatatatcgaagaagaaggtatggcttaccgcggtacattcgtagtaaacccggaaggaaagattaaagtggtggaactgaatgataacaatattggtcgtgacgccagcgaattgcttcgcaaagtagaagctgcacagtttgtggctacgcacgacggagaagtttgcccggctaaatggaagaagggcgaatctactctgaagccaagcattgaccttgtcggtaagatttgatagatcttgataatgtgtgtgaagggccggtaacggagacgctgccggcccttcttttaaaagaatgaaaggagaaagagagatgttagaacctgcattaaaagaacaactgaagggtatttttgccggactggaggctgactttacctttgatatatccgtatcagccagtcatgaaagccgtgccgaattgctggaattgctgagcgatgtagccgaatgttccgatcacattacttgtatggtaaatgaaggaagcggacttaaatttacgataggaaagaatggtaaacctacaggaattactttccgtgctatccccaacggacatgagtttacttctttattactcgccatcctgaatctggacggaaagggaaagaattttccggatgaggctgtctgcaaccgtgtgaaagccttgaaggggccgatacacttagtgacctatgtctcactgacttgtaccaactgtccggatgtagtccaggcattgaatgcaatgaccacactgaatccttccattacacatgaaatggttgacggtgcgctgtatcaggatgaagtggatgccttgaagatacaaggcgtgccttctgtatttgccgatgggaaactgcttcatgtcggccggggcgaatttggcgaattgcttgctaaactggaaacgcaatacggcattgatgaaaccaaggcggagacggaagtgaaggaatacgatgttattgtagccggcggcggtcctgccggagtatcggcagccatctattctgcccgtaaaggcttgcgcgtggcgattgttgccgagcgtgtcggcggacaggtgaaagagacggtaggcattgagaatctgatttcggttcccgaaacaacaggaagcgaacttgccgataatctgaaaacgcatcttctgcgttatcctgttgatttgttggaacagcgtaagatagaaaaggtagaacttgccggaaaagataaactggtaactacttccgtaggagagaaattcattgctcctgcattgattatcgctacaggtgcaagctggcaaaaactgaatgttcccggcgagaacgattatatcgggcgtggagtcgctttctgtcctcattgcgacggtcctttctataaaggaaagcaggttgcggtagtgggcggtggaaactccggcatcgaggcagccattgacttggcaggtatctgttctaaagtcaccgtctttgaatttatggatgaactgaaagcggataatgtccttcaggaaagacttaaatctctgccgaatgtggaagtattcgtgagttcgcaaacgacagaagtaatcggtaatggcgataaactgacagccttgcgcatcaaagaccgtaagacggaagaagaacgtttggtagaactggacggagtattcgtgcagatcggactttccgccaatagcagcgttttccgtgatattgtggaaacaaaccgaccgggtgaaatcgttatcgatgcgcattgccgtaccaatgtgacgggaatctatgcagccggagacgtatcgaccgtaccttacaaacagattattatttctatgggcgaaggtgcgaaagctgccctttctgcctttgatgaccgcgtgcggggcatcatctgataaaatagattatttatacatttcccctcatgtataagtaatggccacagagattgtaaaaagtctcttgtggcttttatttttttcttacctttgtgattctaatatttaacccccaatgagaaacatgaaaaagatattcttactgatttccgcgatcttgttaattgttccggtgcaggctcagcatacgttgagactgatgacctataacatcaaaaatgcaacaggcatggatggtgtctgtgacttccagcgtattgcaaatgtgattaataacgcttctcccgatgtggtagctgtgcaggaagtagacagcgtgaccaatcggagtaatcagaaatatgtattaggtgagatagccgagcggacacagatgtatgcctgctttgctccagctatagattatgatggcggaaaatacggaatcggtctgctgtcaaagaaagctccgcttcacttgcaggctatagctttgcccggcagggaagaagcccgtgcattgatcttagcggagtttgaagattatatttactgttgcactcatttatcccttacggaagaagaccggatgaagtcattggagattctgaaaacttttgctgcttcctataaaaagcctctttttctagcaggagacatgaatgcggagccggaatcggattttatcaaagagttgcagaaagaatttcggatactctctaatcccaaacaacacacttttcctgctcccgccccaaaggagactattgattacgtggcggcttttaagcagaatgataaaggatttgccgtcgtctcttcggaagtggtgaatgaacctgtagcatccgatcatcgccctattgttgtggaactgcgcactgccgaaaaggcggataagatattccgtactaaaccctatttgcagaatccggttggaaatggaatgaccgtgatgtgggaaaccactgttcctgcttattgttgggtagaatacggtacggatacgactcaattaaagcgtgcgcgtactattgttgacggacaggtagtctgcaataacaagttacataaaatacggctggatgatttgcagcccggtcaaaagtattattatcgtgtctgttcacaagaaatgttgctttatcaggcatataagaaagttttcggaaatactgcccgttctgctttcagtgaatttactctgcctgtaaccggtacggattcttttactgctgttgtgttcaatgatctgcatcagcatacccatactttccgggctttgtgcaggcaaattcaagatattgactatgattttgttgttttcaacggtgactgtgtagacgacccggcaagtcatgatcaggcaactgcctttatcagtgaactgaccgaaggagtgcacggagattgtatcccgactttctttatgcgggggaatcacgaaatccggaacgcttattctatcggtttgcgtgaccatttcgattatgtaggtgacaagacttatggctctttcaactggggagatacccgtattgtcatgctggactgtggagaagacaaaacagacgatcattgggtctattatgatttgaatgatttcacccagttacgtaatgaacaggtcggttttctgaagaaagaactggctgccaaagaatttaagaaagcgaagaaacgtatccttctgcaccatatccctctttatggtaatgatggaaagaatctttgtactgaactatggactaagctgctggaaaaagctccttttgatatctgtctgaatgctcatactcataagtatgcttatcacccgaaaggtgaattggggaatcattttccggttgttataggtggaggatataagatggagggtgctaccgtgatgattcttgagaagaggaaagaagaactcagagtcagggtgttggatgcaaagggagaaactttgctggatataacggtctgaataatgtatatgatagtttgaatcatagaattgaatttcaccccaaaagtttagtttctaacttttggggtgattctttttatattgataatacctaatagttcctttacctcttttttattttagcttcctcctgagatgacaatgaatgtcaggcccaaaatgaataatataaacatgactcccaaaagtctgtttgtcgctttggagctaccggtaaattctttccagatgaaaacaccccaaagggcagcaatcatcggtgctccttgtccaagtgcataagaaatggctgctcccgcttttcctgcggcaatgtagcttaatgccgtacctaatccccagatgcatcctccgagaattccgaccatgtgtgtacttgcttttccggcaaagtattccttgtaagtgacgggtaaaccgacgaacggacgcttcatcacaagtgtattgaagaggaagttgcttaggaagattccgatggcaaagatgaagaatgcagtataaggagttgccattcctgctgtcggtgattcaaaattgttcaaatccatggcagcggcgacaaaccggtaaaagaatgacatcagtataccggcaatagctgcaagaataattccctttttgctattattggttcctgccttttgattcttaccggctgcaataccgttgcaaatgatggcgataacaatcagcacgactcctgtgaatagccagaacggatctcctttgggggagctgaaataattaatgaatactcccaagaccaatgccagtcctactcctaatggaaaagctaccgccatcccggcaacggatacagaggcggaaagaagaatattggaagcattgaaaataactcctccgataagtgcactggcaatatatgccgcttccacttgttggatgtcttccagaaaacctcttcccgaatctccgaaacttcctagtgtgaataccagaagtaaggcgaacagcaagatgccgatggtgtagtcccaataataaagttcataacgccaattcttactggccagtttttgggtatttccccacgatccccagcatatcattgtgataaagcagaagataatagctaaggtgtaactattgactatatacataatgatttttttttaagatttcaattctcttttcctgtcacttgtcttataagtgcgttgcgggttgcccgaatattttcttccccttgaatagtgagatattggtgtttaccgctttcagaaggagaaaaaatactttgtccgatactgtctatggtgattgttcccttctcggataaattgaaataattattccccggttctatggcttgtagcacggatgtcaaatcccatgtttctctgtcatatggcatttcctgatatattttatatgatacgcacagaggatgtttataactgccggcaaaatcatttaatatactttgatgaggatatcgaattttgtttcctagttcccatccgctggcaataattggagtaggccattctttgaaagtaatttgggctgcattcagatcattaacaatgttccattcagggaagtcgaattcattaccatagagtcctcccatgacagatagtaattttaccttttgtgctaccaaggcttttccatccagctcgctgtattcatctgcttccgagataagcaaacgggctagatttgtttccgggcctaaggctataaataccacagaatgatcttcttgctctgccagcaatttacgcaacagtttatatccttccagaatatgatcttttaggcttctttttggatgtaatattttattgttgtcaataatagtatccagcgtttggcggagataatgtccgtcgtctgtattcatcccattataagcataacctaaaggtatgtcgtatttgtcgttgaaacgacaataagcgtcaatatattccagtgaataaggattacacttgcttatagtgatacctagcaaatcaatttttccttttttctcataattaagcagcatttgcatggctaaaacatcatcgatatcatttccaacatccgtgtcgagtatgacaggaattgcagaagtagtctctttttgttgtgcacaggaacagaataaagagacggttattagaatgattgctatatatttgaacatatcttgggtttttataagttatttccaatattctcaattgtattgctggttaatgattgttgcgaggaataatttactttataaagtacgcctcctttagcatggagagtctgattttctaaagttgcagttccttctttggtaaatgtgccatttacatcatatcttccggaaatggtttctccaaatttaccattctctagtttgaattgagagtcattcaaactataaatcagtaaataattgtgcatatctaatacgaaacctaaagaagcattatttgtctggaatgtgatttgtgctccagtagtacatattagttgttctaatttgtcttttggctgattatcgttaatattaaatgctgcaaagttctccggttttactttggcaacatctatataagctgccgccaagccttttatgagactacgagtaggaggtgtaaaatctttttcttgtaaatcccatgtataaattccgtggtcaatttggtccggttcagtggtgttgttgataaagaagttactggtagccaaatcgtaaatatcatagcctcctcctaatgcgaaagatgtcaagataagactcggactgtttgcataactacctttgttctcggcaaccagcgcataatttcctgcaattgatgcgtatgccatgacttcatttttgagatgtttaacattatctttataagcatcaacgccaatgaaatcaatgccttgaagatcgaatacatctttggggcgagcattagtagcctctggaaatggattaataccatcaccgtaaattagattgacacgagttactactctgtaagaactgttttttacagcttttcctacagtatttaatgcatttgtgatcattgtccaggccttctctttgcttagaggggtcccatcccgatattttaaatctttttggtcgattctccagcgcattaacgcatcaggttcattatggatctgagctgatataacggggtgcttgtctccattttgagaatcccagtatcggatgtggttaaataaggcggtgatggctttggtttctctctccagtatccattcatcatcaagaatcatggtgtattgataaccataatagttccaaaaatttccttcatcattccggctgagccttttgttatattcttgaagcacatattgaggtatcaggtaggagaatgaatctcctaccatattcgtactgaaccaaagtaattccattttcaaattatacttgttgacgaactgcaagattgagtttacgatactataatcgtacttgttttctttaggctctaccatattccatgaaattggaatttgtacacaatttagtcccagttcctgagctttcttgaagtagttttccacttcattaatagtcatcttgtcacaattgagaagggcatcaaggcgtatttgtgcaccaagaaacggaaaaggtttaccgtcaacagaaacatatgttttgttgttttcagtcactagtttacttacttctatttgagaaagtattggttcgacgtatgtttcattattattgtcagaacaagctgttgcgaataatgaaaagaaaaccagtgcgtaagttagtattatcattcttttatacataattggtctttgttaaattagtagattattggattattgcggggttcctcctcctgtcataggccagcccggattctgatagataggagaagaatccaaatcacctccggatgaagtaaccagaaaatgttctgctgctatcggatcgagatagtgtgccatattccatttatagccgttgtaaacaatgttattggctgtgatgtgataaggagcaagataagtactgaagctacgtggtgaaacattttctccttctttaagaatggagttgccgttagaatctttataccagtcccagccatacatttcctgccataaattcattcctaggatatggtagggtttggtaatcatctggtccattgaacgccatctatgtaagtccatgctacgtaaaccttccgccatcaactcacatcttcgttcacggcggatattataacgtgtggcatcaataatttctccgccggaatatgccccccaatcagtttctgcttcttttgacatatctgtaagcctgattgttttggtatagtcctcatcaatgccggctctgcgacgaatcgctttccagtacttttctgcataggagtcgagtgaaccatgcaattcataataagcttctatatagttgagataggcttcggctgtacggaatatgatagaaccgacaatactttgagtgttatttgtgtatttcccgtcagggtttaatcctttgcgtaaggcatagcctgtattgtacttttctgtaacagaagaggcggttatattgggtccccattcttctactaccccatgatctcctgcctgagtatgcaaatttttctgtcctggctttttgatgaagatgtctgcacgggtatccctgtttttagtgatatgaatgatattattatctccccaataagatgagttttcatctgcccacatcggggatgcataaataggttctccatttttaagaataaaggcgtcaatcatgcttttagtagtgcctactccattgttgccgacacatccgtattgacaaacttcatttgccactcctaatcctgtgttgtagcgcctccataaaagtacttcattgtatttctccatgtcaatatcgcagaacatactgaaataaggattttcaggttccgaagaagtttgtgggaatactcctgtattggcagttaatatattatatttttctgctatgatttgtgccgctttaatagcttcatcaaagaagaactctgattctttttcaatacttccggatttaaatgagtaattagcattataatctttatttgctcccggccatcccggtccattgggtacaaaagctgttcctttaaaattcttcagccatgagccttcgtaaagtgcgacccttgacttgagaaggatagcgcagtctttgcttagccggttcttacctccggaaggagctatgttttgcatcatttctatagctttgtccagatcagataagataaatctggctacttcatttcggggggctcgtttgctgatttctatcagagcttcacgttcattaggataagttttagtaataataggaaagtcgcctaatgattttaatctttcaaaatacatgaaagctctgaagaaatacatttctccgatatagtgtttgatattggtcgtgtttccgacaatggcattgttttcatacgatggaagcacattttcaaagaaataattgcatcggtaaatatcagcgaaataccatgagcctccttcttgtcctactttccagtatccgggtgcatacattacgttaggttgcataccggccatattatctgtgttattgtcaatttcaaaagttccatatccataggtgccatgagtaggtagcacttgatattgatcagtagcaaaagctgcaatattactttctgttgtcagatattcatttggagaaagttgatcaagaggttcttgatttaggaaatcattgcaacttgtcaaaaagagcactccgctcaataaggttgatatcgtaagtcttttcataatatcctgtttttagaatgtgacatttaatccaaaagagaatgttcgggatagtgggtaaacgtttccgtgtccccaactaccgccttcgattgattcggggtcgaagaagtcaataaggctcgtaatggtgaacaagttttcaccggatgcgaatatcctaaggtgctgcattcccattttttgtacgatgttgtgtggcaagctatatcctatctgcagattcttcagacgtagataagatgcatcttgtaaatatttagtttgtgattgctggtttttatcggtgttgaataagggtcttggatagtaggaattcagattcgttcccaatggactggcttcgtcatttcggaaataatcatcgtgtccttttagtgctgtggaaaaccagggcccttgtctaccgtttgcaccccagaagtagtaactaccctgaaaataatcttttttcaatgttccttgccagaacattctgatatcgaatcctttccaatcggcggctaattccagtcctacattatatcggggcgtggagttacctattctttttaaatcaccgtgatcttgtaaggtgcggcttccggcatcaatttttccgtcttcattcagatctttatacataatgtctccggctttccagtcttgtccgagattactttgtccaccgttgattaatcttccgatgtgttcggccatttcctggtcagattgtgcaatgcctatcgtttcatatccccatatttcacccacgtattttccggcataaaatccatctatcagtccggaaggatttgaataacgagtaatcttggtacgactgtcggcaagtgtaaagcgggcactataattcaatccattatttaaccggtctttccacattagttccagttcccatccgaatgttttaagatttgtattattggaactgggaacggctgttccaaggactacaggcaatttctccgaagggccgaccatatcgtcagttttacgaatgtaataatcaaaagagccggttagccgattgttaaacaggccaaagtcaactccggcattccatgtacggattttctcccaggagagattatagctgacgagtgaaggtgcccaggcaatattggctaatgttccgtcaatgatccatgatcctgttcctgtaccgattgtagaataagtcggatataaagaagatgtattttggttacccaaactaccataagaggctctgaccttaaatgtgttgacaactttgctgacaggcaggaagaatttttctctggctatgttccagcctactgatgcggaagggaaaaatccccaacgactgtcactacgaaatcgtgaggaaccgtcatagcgtagatttacttccagaagatatttttccaggtaatcataattcaatctgccgaagaatccggcggtagcccatctgttgtgtccacctgctacattcggagcaactttttggttatttgaatccattccggtagaagtgttgatagtcggttttcccggataaatgactcctagcttctcagcagctatatctttataattattttgttcggcttgaaacccgaaaagaactttcatattatgtgattttgcaaaggtctttgcataatctgtatagagatttacattaaaataatcgctggcataagtgccttcatgtacttgggaatcgttattccatgtattgcccttagtctttccgtcaacacctgtctgatgaacagttaagtaatcccagtgtgaatattgtgtattgtatcgatagcttaaatctccaatcagtcgccaccctttgataggttctaccgttatattcagttgttggtagagccaagtgtttcgttcttgtttttcacctccgttttgcatttggagcacatggtcgtcatatagaataccatttgggtcatagagaggtttggtaggccaacattggcgtccgatttcggcaaaaaaactttcattaagatgtgtcggctgtacatagtcacttctgataaagcgagtattgaatccgactgatactatttttgataattgtgcgttgatttttgcagatgcagtatatctgtttgagtattcatctccgattctgagctctccatcctgacctaaatagttcgctgataaatagtattgtattttgtctgtcccgccagtaacgctgatattgtgctcgtgtgcaaagacattgtctttgaaaaaatagtcataataatcaatattatcatttccttgtgaatatccgtctgcccataacgaaggattattgggcacggggatggtagaatcggtaatcttgccggccatatagtctttgatgcggtttatcctttcttccgagacccagttgtaaggtccccatccggaattggcagctgcatcattatagtataaggagaacgtgtaagagtctaatgaagaaggcatgttgatagggctacttacacgaaaactgttgttgtagttaacttgcgctttaccggcctttcctttcttggtcgttactaagattactccgaatggcgctctggaaccataaatagaagaagctgccgcatctttcagaactgaaatagattctatatcctgcggattaatggaataaatatctccttccataccatctatcaagactagggcacttcctgtagaaccttctccgatagttccgactccacgtacattgatcgattgtttctgattgagacctcctccctgattgctataaatattcaaaccgggaacctgtccttgtaatgcctggactgcattggatacagggattgcttcgaaggctttcgagtcaatgactccgacagaaccggttaaattaatcttcttttgggtaccataacctacaacgatcacttcatccaataaattgtcgtcaactcccagtgttacgtttatcatttttctatcacctactgtaaactggactgttttaaatccgatgtaactgaattcaatagttgaacttggatccgctttcacttggtagtgtccgttaaagtcagtgacggttccggatactatattcccatcttttacttttatggaaactcccagtagaggttctccattattatcttttactgttccggatacataattctgagcatatgtattcattgaacataaaagtaggtagcccagcaggcagataagcttatgacttgagttataagttatcaggtggacagctttctttaagagagtagagtgtcgattagttttcataatccatgaaatttaaaagttgaatgataaggctaattctttttctaacatgaagtgttttacttcatcgagagtaggaatagacggttgggcaccagaacgtgtaacagcgatagctgccgcggcattcgcaaaactcaatgcatctcggtctatttccctttgggcacaaattacagccaatgcaccacagaacgtgtcacctgctgcaatagtatcaatcgcatttactttgtatccgggaagctgaatgatttctttgtcgtttttcatatatacaccttgacttcctaatgtgatcacagcattgcgtgcacctgcctgtaataagcttagagcgatttcttcaagattatttcctgtatattcaattcctgagatgaaggctgcttccagttcattgacgactagtatatcaatggctttcatcagctcctcatcaatcaggcaggcgggtgcgggattaaacaatacctttttacctttttgtttagccagaagagctattcttttaatcgtttcgtaaggaatctcggcttgcataactatgatatctgcttcgtcaattacctttgaaaaatgaataattgaaccgggtaataaagaatagttagctccgggagctactgctatgcagttttcaccactgtcggcaacaaaaatgagtgcagtccctgtgggctgattaacatcatctatgatataatcagtagtgataccttctttcttaaagtgtttttttagaatttctgcatacatatcatttcccaaagaggtaatgaacgttacagatcccccgagtcttgctgctgctacagcctgattggcgcctttccccccgagggattgcatgaaactggcatctccgactgtttcgccaggcgccgggagatggttgacttgtgcaaccatgtcgatgtttgaacttccaataactactactttcatttgaacagatttatgtgtttaacctaggtcttatctcgtttatagcacaacttctcttttataaggaatcgcactctgtgcaccgattcgcgtgactgctatagctgccgccgcattggcaaatttcacagatttagcgagtgaatgcccttcagacaggcagacgctgaatgctccgcaaaatacatctccggcacctgttgtgtcaatcgtctctacttcctttgcaggaatcatggtatattcatctttctcttttacgtaagccccgtctttacctaaagtaatgacaacattctctatacctttctctccgatagcctgagcggcacgatgagcgctttctatattcatcactttgattccggataacatttccgcttcaatgcggttggggagtatggtgtgcacgttcattaagaatgagttgctcaggctggacgcgggagccggattgaggattacctttttcccatatttgcaagcaatagtagctgcatattccactgtgtctatgggaatctcaagttgcatgagaataatatcagcttccttgattttttcttcggctttattgatatcctcaatagaaagcgaacggcttgctcccggtgctacgataatgctattttcaccgaaagaatctacggagataagtgcaactccggacggacttttctggtcggtaaatatatattccgtattaattttctctgatctgtatatttccaatgcttgcaggccgaacaaatcatatccgattttggatatgaaggtgacttcagctcccagtcgggcggctgcaatcgcctgattagctcctttgccaccgggattcatgtagaaggttccgcctagtatggtttctccgggaacaggtagtctgttggctttcacgaccatatcggtattgcaactaccgatgactacaattttgggtctatgaattgatatagtttccatagtattaaaaattaagactatgcaaatgaaagcaataatcatgcatagttttctacattaataattggtttatataatctcaaaaatgatatcttatattggattttccttgtatagaggagagaatatagaggtaatgtgaagcgaatttatataattacaaagagaaaatggagatttgaaaagagtgtttttatcgtctgaaatacgaatcagacaccttactctttaacattcttttgcgctagcacgtgctctgaggacttcagacagtttttctttccgaattttggattccatccacgccgtaaagtcaaagaggcgtaaaagctgactttcatatttattattatataattcatgaatctcaggagacaacttttcccaaaatgcttctctgtcttttttcaggatgggaatatttcttttattcagaaaccataaaatgatacgttctgttttaaaagtctgctctttgggcgaagatagacttcgggtgatggaacgggattcatactggattagctcatgctcctgcacttcataaaagacgatgaggcggaccagacgaatagttctcattaaaggcagatactttatgttatggtctatgatagcgttgctgatatactttttagcagttttatattcttggttaccaatgtgtacgagtgtggtgtaaagcaataattcactttttcgaatagggcctaaccaggcttctttatcataaagtatttcctggtagtctgccataagttgggtacatttcgaaaaatctcctttatccagatagggaaatagttcgtattggaagagaaggcaagttgcatttactttaaattcgagcgaagtgctgtctgatataagctttcttaatttatcaaggaagtaggggatttcgtcatagttgctcacagaccgcaggctaccgagtactccttcgagtacagataaatagtatataggaggatttgaccagaactgctgattctgctcaaataatgagtctagttctttgtatgaatttaaggcagctctgtaatcgcctgctcccatcaggtaattagcctgaaaaagtttatggtttcgtgttaattcaaaattaccttcggagtctgaagaagcggctatataaagttcgttgaccataaggtcattcatatcctgtttttgctttactgttctgatggagccaatatgagataaacgatatttcaataagttgtgtaatgaagattgctctgtgattttccgaatctttttcaaagcttcattttggatgaagtgtttgtgaaaaagctcctgttctgtcatgttgggaaagttcagacggagcagatattccagttccagcttcaaagctatcgtcagaatttcgttgttctcatagaattgtgcttgttctattgtattggatagtatttcgaaacactcttcaaacagagaacgttcataaagcattcgggctttgcacaaattattcagcagatcgtaatagatatctttctttttacgcagggtgagtaacgtatccgtcagcttttcatataagtattgaatggatacttcaaatgagccattgggcttgcgtctgtaaaattcctcttttacagtatttccattcggttgtttactctttatgataatatcataaatcaccagatagtctttttcctccttgtccttgataacctgtagggagaagtgcttcttttctgatttagataacgagtatatcagggatataacggaatctactcttttcatagggaactctttgcattagtattagattgcaatattcgggaatttttatgtaaaaagcaaatctggcattctgtcactttgtgttttctgtagctctttgttgcgtatatttgtgggaagaggccgggcctgttctgaaaattgcagggaattctcatttcctcagatcagaaaaatatattataatgtgattgaatgtttttctgccttgaaaattgaatgtttgatagtctatctgaaaataatactcattttggatggtttttcataagaaaagctataccttcgatgtactttttaataataaagatgaaatgttggatttaaagcaacttacagttgaagtatgccgcatagctaccgaagctgggcattttctgaaagaagagcggaaaaacttccgtcgtgagcgtgttatggaaaaacatgcgcatgattatgtgtcgtatgtggataaagagtctgaagtacggttggtaaaagcgctttctgccttgttgcccgaagcaggatttattatggaagaaggctctgctacttatcaggacgaaccttactgctgggtcattgatccgttggacggaactacgaattatattcatgatgaggctccttattgtgtatgcatcgctctgcgcagtcgtaccgaattgcttttgggagttgtgtatgaagtctgccggaatgaatgtttctatgcctggaaaggaggaaaggctttcatgaatggtgaggaaattcatgtttcggatgtccgggatatcaagaatgcatttgtgtttactgaattaccttataattatgatcagtataaaccgacggctctccatctgattgataacctttatggagccgtgggaggcattcgcatgaacggttcggctgcggctgcaatctgttatatagctaatggtcgttttgatgcatgggccgaagcgtttatcggtaagtgggattattcggcggctgccctgattgtgttggaagcaggcggtcgcgtgactaatttctatggtgacgaccattttatagaaggtcatcatattattgcaaccaatggatacctgcatcctttatttttgaaactcttagcagaagttcctccgttggatatgtaagactgctgcgattgtataaatagctactactatgaaacacacattacttataaaagattggctttattcttttttgtccctttggtttccccgttgctgcgtcgtttgtggcggatcgttggctaaaggagaagagtgtatttgcaccatgtgcaatataaacttgcctcgtaccgattatcatcttcggaaagacaatccggtagaaaaactcttttggggtaagtttcctctggaacgtgccacttcttttttcttttatcgcaaaggaagtgattttcggcaagttctccaccaactcaaatatggaggacaaaaagaaattggtgctattatgggacgatatatggcatccgaattgcaggcttccgacttctttcatggagttgatgtaatcattcccatccctttgcataagaagaaacagcagatacgtggctacaatcaaagtgaatggatatcgcgcgggattatggccgtaacaggtattccggtggataccgaagcaatcatacgccggaagaatacggaaacgcaaacacaaaagtcagctttagaacgttgggagaatgtagatggaatcttcgaattgcatcgttcggagtatttggcaggaaagcatatattaatagtagatgatgtgttgacgactggagcaactaccgtagcgtgcgcttctcggctggcagagattgaaggagtacggattagtgtgttgacgttggctatggcagaatagggtagcttgtcgtcttcccgaagactctctttaatatataaactataatgaatgccaatgcttacattatgttgttgctgttctacaaataagtactttctcttcataaattaattcgtccgcctatgggcaaacgcaacgttgcctataggcaaactttcgtccggctataggcggacgaaagaatgcctatagccggacgaattaattcatgtacccaaagaacttactttattcagatggaaagtttattgttaacctttgaatctttaaagttttatagaccatcaaaagacaagaatgtttttgtgaataaaagaaggggatgagagtttcggttttcggactgaccctctattttcgaagcaggggggagaagagcagaaacaaaaaagaggtctatctttcgatacacctctttttgctcttcctcttggacttgaaccaaggaccctctgattaacagtcagatgctctaaccgactgagctaaggaagaatgttgcaatcaagaatttcagttttgctcttcctcttggacttgaaccaaggaccctctgattaacagtcagatgctctaaccgactgagctaaggaagaatgtttttctcaattgcgatgcaaaagtagtaggtttttttgaaatatgcaatatctttgcaaaaaaaatattgagaatggacaaaataataggattgggcaacgccctgatagacgtacttgcaaccctgaaagacgatacactcttggatgaactggaattacccaagggaagcatgcaactcatcgatgacgctaagttacagcagattaacacaaaattttcacaaatgaaaacgcatctggcaacaggcggatcggcaggaaatgccatacttggactcgcttgtctgggtgccggaacaggttttatcggaaaagtaggaaatgatcattatggcgatttttttcggaaaaatctgcagaaaaataatattgaagacaatttattgacctccgaacagcttccttcgggagtggcatccacttttatttctcaggatggagagcgtacttttggtacttatctgggagcggccgcttctttgaaagctgaagatctgacattggagatgttcaaaggatatgcatacttatttatagaaggataccttgttcaggatcacgaaatgattcttcatgccatcgaactggctaaagaggctggcctgcaaatctgtctcgacatggcaagttataatatcgtggagaatgatctggaatttttctccttattaataaataagtatgtggatatcgtttttgcaaacgaggaagaagcgaaagcatttaccggcgaagaaccggaggaagctctgagagtgatagccaagaaatgcagcattgctattgtgaaagttggagcaaacggatcttatatccgtaaaggtacggaagaaattaaagtgtcggctattcctgtagaaaaagttctggataccaccggcgcaggcgattatttcgctgccggatttctgtatggtctgacgtgcggatactcgctcgaaaaatgtgcaaaaattggttctattctctcgggaaatgttattcaggtgattggaacaacaatctctccggagcgctgggatgaaattaagttaaatattaacaaggttctggcggaataaccaaggtttgagttacttttacgtctcattttaatgaaagatatatgaaaaaattgctgaataggcggatagctcttgttttggtggctgtaatagctactgtagctttctttagttttaagagtggagacgaccgcaatttccagattgccaagaatctggatacatttaatgcgattgtgaaagaactggatatgttctacgtggataccattgatccgaacaagaccattcgcgaaggaatcgacaatatgcttttctcgctggatccttatacagaatattacccggaggaagatcaaagcgaactggaacagatggtgaaaggaagctttggaggtatcggttctcttattacctataatacgaagctgaaacgttccatgattgccgaaccgttcgagggaactccggcggccaaagcgggactgaaggcgggagatatcctgatggaaatagacggaaaagatctccttggaaagaataattcggaagtcagccagatgttgcgcggacaggcgggtacgagctttaaactgaaagtggagcgtcctaatgagaaaggcggacaaaccccgatggagtttactatcgtacgtgaatctattcagacccctgccatcccatatgctaccgtgatggataataaagtgggatatatcagcctgagcacattctccggcaacccttccaaggatttcaaaaaagcattgctggatctgaagaaacagggagctacttctctggtcatcgacctccgtaataacggtggcggtctgttggatgaagcagtggaaatagccaattatttcctgccccgtggaaaagtaatcgtaaccaccaagggaaagacgaaacaggcaagcaacacatacaagactttgcgtgaaccgctggatctggatattccgattgccgtattggtaaacagtggtacggcttctgcttcagaaatcctgtcgggctcattgcaagaccttgatcgtgccgttattgttggtaaccgtacatttggaaagggacttgtacaggttccccgttctttaccttatggaggaatgatgaaagtgactacttccaaatattatatcccaagcggacgttgtgtgcaggcgatcgactataagcaccggaacgaagatggaagtgtgggaacgattcccgacagtctgactaacgtattctatactgctgccggacgtgaagtacgtgacggaggtggtgtaatgcctgatattactgtcaagcaggaaaaactgccgaatatcttgttctatctcgtacgtgataatctgatttttgactatgcgactcaatactgcttgaaacaccctactgtggttgctcctgaaaagtttgtagtgacggatgctgactataatgatttcaaggaattggtgaagaaggccgattttaaatatgaccagcaaagtgagaagattctgaaaacactgaaagaggctgctgaatttgaaggctatatgacagatgctgccgaagagttcaaggcactggaaaagaaattgaatcataatcttgaccgtgacctggattatttctctaaggatataaagagaatgattgctaatgaaattatcaagcgttattatttccagagaggtggcattatcgagcaactgaaggatgatgatgatttgcaggaagcaataaaggtattgaatgatcctgcgaagtataaggaaatgctaagtgcaaaagtacagaaggaagaaaagaagtaacagctatcttcataaatacaaaagcggtggacatctttacaatgtccaccgcttttgtatatgacgcatataatttaccggttggccagcggaagtgtgaaataaaaggtggtaccttcgttttcttttgagcatacccggatgtgaccacccattttttccaccagcatcttacagagggtgagtcccagtccggtgccttgaacgaagtcgtctactttgccgaaacgctgaaaaatggtagcggctctttcggcaggaataccgatgccggtatctctcacatagaactctacaaaattctctttattgaggaaaccgaaatgaatctctcctcgcgaggtaaactttacagcattgctgagcaggttacttacgatttgtatcgtccggttccagtctgcggaaacaaatgtattggcgtctccgccatccagaatcagttttacgtctgcctgggttttgtgaccatattgctgttctaattgcaggcagatatccagtatcttgaccggctgaatgttgaatttaagagagtcggcttccaggctggataaatcgagaatatcattgaaaagattcagtagcatatcagaatttctttcaatgatttcggcatactgattcttctcgttttcattatttgtgctggatatcagtttggagaatcctacaatcgcattaagcggggtacggatttcgtggctcatgtttgccaggaaagccgattttaaccggtccgcttcttcggctttgatacgggctgcatccagtgctttctctgttttcttaatttcggtgatatcccaggagataccgataatataaggatgttcgttactggatgggacgaggcgcttcatggtagttatcgtgcggatttctccggaagcagccatatattcttcgaaatagtccagtttcccttcttttagcactctgatatcgtcaaggcggaatttctccatatcctccgtccgtttgaagatctcgaaatcatttctgccgatagctttctcgatagggataccggaatagtctgcaaaagtcttgttccagtataagtatctgaaatcatttccggagtctttgacgaatagatatacaggaacattattcactatggcttccatcaatgaattaagccgcataatttcattttgttgttcggcattggtctgttctgtttcccaaagttgcgaaacatcccgacacatacatagcagatattctttgtcgagcagggaaagccagtgttcgtaatgatgcggtacaccgtccatcattaagtcatgcctggcgatggcgctctttccggagcggaaaacttgctccatattcttgcgtatgttcttgtacgcatcttccggaagaatatcttttatgttggattgggtaatgctgtctgctgtagtaccttctacgtgattggttgacggggaggaaaccagttccacgatattggcatcgcggtcgagcacggtaagcatatcgggcagattatctaatatccgattggaatacctgtcgcgaaagcgttcttttctgccggagactgattcggaggaaagctgctctacttttttttcgagattttgtataatttctaacagctccgcttttgttttgttgttgtaatcctccatagaagatgaataataactattttagtgttgtagaaaatgcatttttatgttgcaaatatagaataaaaattcaagaaacgggcgaactcccaagttattataatataaaaaagaaggatagcttttgccctactaatcagaatgttctatctttgcaccaattacattttaaatgatttacaatatgtctacagaattattctctactctgccttataaagtggcagatattacacttgctgatttcggacgcaaggaaatcgatttggcagaaaaagaaatgcccggcctgatggctctacgcgaaaagtatggagaatccaaaccgttaaaaggtgcccgtatcatgggatcattacatatgaccatccagaccgccgtactgattgaaacactggttgcattgggagctgaagtccgctggtgctcttgtaatatatattcaacgcaggatcatgctgctgctgcgattgctgcttccggtgttgcggtatttgcatggaaaggcgagaatcttgccgactactggtggtgcacattgcaggcattgaacttccccggcggaaaaggtccgaatgtgattgtagacgatggtggtgacgctaccatgatgattcatgtcggttatgatgccgagaatgatgctgccgtattggacaaggaagtgcatgcggaagatgaaatcgaactgaatgccattctgaaaaaagtattggctgaagataagacccgctggcaccgtgtggctgaagaaatgcgcggtgtatcggaagagacaacgaccggtgtacaccgtttgtatcagatgcaggaagaaggcaaattgctgttcccggcatttaatgtgaacgattcggttaccaagtctaagtttgataatctctacggatgtcgtgagtcactggctgacggtatcaagagagcgaccgatgtgatgattgccggtaaggtagtggtggtatgtggttacggtgatgtgggcaagggatgttcgcattcaatgcgctcttatggtgcgcgtgtgcttgtgacggaagtcgatccgatttgtgcgttgcaggctgctatggaaggtttcgaagtcgtaacgatggaagatgcctgcaccgaaggtaatatcttcgtgactactacggggaatatcgatatcattcgcattgaccacatggagaaaatgaaagatcaggcgatcgtatgtaacatcggtcactttgataatgaaatccaggtggatgcgttgaaacattatccgggcatcaaatgtgtaaacatcaagccgcaggtagaccgctattatttcccggatggtcacagcattcttttgctggctgacggtcgtctggtgaatctgggatgtgcgacaggccatccgtcattcgtgatgagtaactcatttaccaatcagacgctggcccagatcgagttgttcaacaagaaatatgaagtgaatgtataccgcttgccgaagcacctggatgaagaagtggctcgtctgcatcttgaaaagatcggggtgaaactgacgaagcttactcctgaacaggccgcttatatcggtgtatcggtagacggaccttataaggctgaacattatagatactaatttaattgacaattgacagttgacaaatgacaatgaacagctatatggaacgagtgatctgccgggctgttattgttgaccttcaattgtcaattgtcaattgtcaattgtcaattttatgaagaagttccttcccgacttaattgctattttagcttttatcatcctttcttttgcttatttttttccggctgatatcgaaggtcgtattctgtttcagcacgatacggtggctggagtgggagccggtcaagaagctcaggaatatcttgaacgtacaggagaacgcacccgctggacaaactctctttttggtggcatgcctacctatcagatgtctccgagttatgattctaccaaaccgctgaagtggatagaaaacatctatcacttgtatcttccatcttatgtggtgctgaccttcatcatgatgctcgggttttatatccttttgcgggcattcgggttgtctgtctggttatctgctttaggggggattatctgggctttctcctcctatttctttattttgatatcggcagggcatatctggaaatttgtcacattggcttatattccgcctacgattgccggtattgtactggcttatcggaagaaatatctgttgggagggattgtgactgctttgtttatcgcgcttcagattcagtcgaaccatattcagatgagctactacttcatgtttgtcatcctgttttttgtaggagcttactttgaagatgcttataagaagaaggagttgccgcattttttcaaggcaagtgccgttctggcattggctgcggcgataggagtgtgtgcgaacctctctaatctataccatacttatgagtatagtaaggagactatgcgcggaaagagtgaactgaaacaggaaggacctgctgccaatcagaccagcagcggactggaccgtaactatataacgaactggagttatggaattggtgaaacgcttactttgctggttccgaatgtaaagggaggggcatcggttcctttatccaagaatgagactgccatggcaaaggcgaatccgatgtatagtaacatctattcgcagctgacacagtattttggcgatcagcccatgacttccggaccggtctatgtgggagcttttgttttatttctgtttatattggggtgctttattgttaaaggaccgctgaaatgggctttactgggagctactatcttctctattctactttcgtggggaaagaattttatgggacttacggacttttttatcgattatgtaccgatgtataacaagttccgtgccgtatcttctatcctagttatagctgaatttacgatacctttattagcggtctttgccttaaaagaagtgctggctaaaccggaaatattaaagttgaaagaaaatcggacaggagtaattatcactttggtattaacagccggtgtttcactgattctggctgttgccccgggagttttcttctctagttatattccggcacaagagatggcagctctgcagcaaggactgcctgccgagtatttatctccgatcattacgaatctggccgaaatgcgcaaggcaatgctgacttcggatgcatggcgcagtttctttattatagtagtaggatgcttcttattattcctttatcagcagaaaaagttgaaggcttcttttactatgacaggtatcgtgcttctgtgtctgattgatatgtggactgtcaataagcgctatttgaatgatgaacaatttgtatcgaagtcaaaccagacaggagcattcgttaaaactcagacggatgagataattcttcaggatacggctttgaattatagggtgttgaatttcgtaggatttcccggtaatactttcaatgaaaataatacctcatattggcataagagtgtgggtggttatcatgcggccaagttgcgtcgttatcaggaaatgatcgatcatcatataactccggaaatgaaggatgcctatcaggaagttgccggcgcaggcggtgcgatggatagtgtggacgcttccaaattccgtgtgctgaatatgctgaatacgaagtactttattttccctgccggacagcaaggacagacggttcctgttgaaaacccttatgcgtatggtaacgcttggtttgtggataaggtgcagtatgtcaataatgcaaatgaagagattgatgcgctgaatgatatttttccaacggaaacagcagtggttgatgcgagatttaaagatcagttgaagggtgtgacgaaaggttacaaagactccttatctaccattcgtctgaccagctatgaaccgaatcgcctggtatatgaaacttcttctgctaaagatggagtggctgttttctctgagatctattatccgggctggcaggccaagattgacggacagccggtggacattgcccgtgctgactatatcttgcgtgtgatgaatgttcccgcaggccagcatacgattgagatgtggtttgacccgcagagcttgcatgttacggaaagcatagcttatgcgtccctggctttattgctgatcggggtgatggtctgggcattcttgagtcgtaagagaattacaaagaaagaaaaataggaaataccagctgttagacgaataagctcaagtataacgagcactagttctttgcgtacacagtattaagtcttagtaaaagaaatgaatgattagctcctttctacatggctttgaatcattgccgcacgagaaaggagccaaatatttattttacttcccactcaaacaacccggtagaaaattgatcgggttgtattacttccagtttcactgctgtcgtttttaccggatcgaagttcactgtattagccgcacctttaactactccatacgaatctgcattttgcacaggacaccattctcctgccgtatctttataataaatcctccatgctttaggcactctgcaaccaccccacggggcatcgtcaaaccaataaaccgtagcacttgccaccaatgtttcctgaggtaattcgtaagaaatccactcgatagttccctgcttgggccaccagtgatagtacggtatgctccggtcgttttcatctttcggaatcaatcggtcattgatggctgaaatagctgtcactttatgcgaggcatctactttactttcggatgccaatgttggcggcatgctgggacgtgaagcactcaactcctgcggtaaccacacagccattgccccagctccccgatgtgcccaagcataataaggtattaaggtaactctgacatccttcgttgtcaagcgtccctcatcattataacttaatagctgagcatctgttttcagttcattgatgccatgcaatacatccggtttctttacgagctcgaattttggggcctgattcataaacaggctaagcacatcgaaatcattgtccacccattcggcacagtatacgataggaccacgttctacggcaatacgtccgcgatcggcttctactttattgttggctttcacggtgcgcggctccatatcaaaatgtattttcacttgatctccctttttccatttgcggttgatgcagaagtatccgttcttcaaatcactttctactttttctccgttgatagtaatcgaataactgagtcgctttccgtcactgtaggcataaaggtcgctcggcactacctgattctttacccatcccgggatacgtaatttcagttgaaaactcccggcattgttcttcttgatgcttattgtgatatcaccgtcccaggggtaatgagtatcctgaacgagttgcacagctttgccatttactttcagatcggaagtattggagaggaacagattgacaaacacctctttatcttttacagcataaatatatcccggcaacgatgggataaaacgacagatgttggatggacagcaagcgcagccaaaccaaggctgacgttgatgttgaccaatgctttccaacggattgggatagaagaatccaccaccatccagagaaacacccgaaatgagaccgttatacaaagtacgttccagcacatcataatattttgcttctccatgcagcagaaatagacggtagttcaggtacacattgccgatagccgcacaagtctcacaataagctgacatattaggcaattcgtagtttttgccgaaagcctcaccggcactcgtggcgccgatacctcccgtaatataatacttcttgctgactatgttctcccaaatcttatcgatggcatgaatataagcactgtcgcccgtgagagcggctacatccgccatgcctgaatacatataagctgcacgaacggcatgccctaccgcctcatcttgttctgtgacgggtcggtgagcttggctgtattcgtctttgcgagtggtgtacccgcgcttatcgaggaagaactttgcctgatcgatgtacttctcgtcaccagtgaccaagtaaagtttcgccaacgccatttctgcaatctgatgtcccggtacggcaacagtttgtcccggtttgtctcctatttcgcggcatacacagtcggcgtatttgatggctatatccagaaagttccgttttcccgtagcttgataatgggcaatagcgccttccaccatgtgtcccaggttgtagaattcatggctgagttcttctactttttcccaacgtttgcttccggcccattcgtgaggatgcttggggttcatggtgcggctggtgtacagatagccgtccggttcttgggcggcggcaacaatgaccaatacgctgtcgatgtacttttccagcgtcttgttggggtacgtttgcagtaggtagctggctccttcgattgttttatagacatccgtgtcgtcaaaagccaatccgcctactttatacgtatcactcggatgggcagctttcacgaagttttcatatcttccggtctcctcacatttgctgaatgccagaggaattgtaacttcacgactggctttcagtcgttgtccccagaagtcatcagttacttttacggaagtgaaaggaacgggagtgatggggtaaccgtgcgatggcgtctgcttcacttgtgcatgtgctcctatcagggagcctgccaatacggttgcgatgatgtaatttttcattgaaaatgatttattgtgtttattaatagatttatttatgaatcgtgttacagatcggtatttctatctcatagaagtactgtttgagtaattcgtacattttagggtcatagactttcagtttgcttctgcggttgatggaattatgaatcccgtcagacggatctgcgtagcgattgcaattgaagaaagactgaacacattctgcaaaatattcttctttgttagagagggcgtaggtgttctgccaaagtccctgcttgatggcattttgtagaagtccttccagttgcttgtcgaaatgagggtctactcctacgattcctactgtatggatgagatgagcaaattcatgaattaagatgttctctcctgcatatcggtcgctaggcaatgccaatacattttcttctccgcaactggcggaatagtcatcttcgggagaacccccgaaacctctggcgcgtttattccaaaaaacgatattctccggagtgtcgcatatatgagcgtattcgggtaagtcgcatacttcttcatgttcgcccagtatcatgacgtggcatcctttttctgccatctttgcttttacgtcggggcgcttggcaagcatcagcgaaacgatttgatgtgcttgcagcaatgcttcgtcgcaaactctgtccgaagagacgatgtatagtccttcggaatcaagatacttctgataaaaggaaggtatttcgttctttacggcaatgggggggccgtctattttccattctttattattacggatagctatttttttcgcaggagtcggcatcagttgtagtttcagtgcgaagccgcctcccgaggcaagatgtactttcaaccgactatttgaggtaaccatgaaagtctctttcttataatcttctgcatttttattggcattgattccgtcggtaaatagagtggcggtatattgttctccctcctttaagaaaggaagatcgagtgctatatcccgctgatcccagttggtcattccgccgatataccagttgatgtctttacgtcttgctgtcacgatgtatttgcccatttctccggataagatctttgtaaagtcggtctcaacaggaagggaagtgatgaagtcgacgcattcttgctcattctggtagttgctgggagcatcacaaagcatggtgaagggtgagtcgtgcacaatgtatgctgccagttggtggcagcgggtgcccatactcatgggggtatgatacatcgctttccagtcagttttcgttccgtttctcatggcaccgggcgtgtagtccaccggtcctgccatcatacgtatataaggaaaggtgacatcgtaaagcggcatgttattctttatatcggtccattttacttcttccattccaaagacgctttcaaagttgaggatgtgaggataggtgcggtttaaaccagtaggtttgtagatgccgtgcaggtcgagaatcaagtggtggcgggcggtggcttctgcaatacgatataccatttctactgctttctggtcgtcacggtcgaggaagtctactttgaatcctttaattcccatttgggcatatttctcgcaggcagcttcaagttggctgtccaacacattaaaaacagtccataacacgatatcaactcccttatttttgccatatgagatgagttcggtaagatccagttcgggaatgacggttagcatatctccacttttcggattataccaaccttcgtcgagaatgatatattcaatgtcgttgcgggcggcgaaatcaatgtagtatttgtaggtatccatgttgatgccggctttgaaaggtactcctttcagattccagtcgttccaccagtcccatgctactttgccggtcttgatccatgagtagtctccgatgcggttgggggatgctaaagcatataccagattgttgacgggcatttccgtatctttttcggtgatggcgagtatgcgccagggataggaacgggggcctgaggtgcgggcgatgaagtcttccgctttagtcacgtattcttgttgtcgccacggatagaaatctgttttagcgggataaggagcgaattttccttgcaggcgatgttcattgccttgcgactcgacaaacatgccgggataattttccagatcagcttccagtagcgttagtttaatcccgttggcatagtcgatggtaacaggaagaaatgcgagtttggaggcggcttgagataaagtggtggcatcgtatatattctggaaagccatagccaatggttgttggtcgttggtactataaggaaggtagacggcatggtctttgctgaaattgaattctgccagttcgttcttgatggtcatttccgaagcgtgagtggtgtagaaacgataggcaactccttcattgtagacacgaaaaaggatgccgaagcctcctttcagctttaaatccaattcatagcacgaagcggtaaagcggttgaagcgatagaatggggcaacgatgttttccgttatcgttttctttttgctttttactaccacaggattttctcccagtgtgaacccggaatggagagtcaatcctatttctgactttgcaagaagtgtgtcttcttggtgtatgatcaaataggataagtgtttgtcggtaccgatctctacttttatttttccgttgggtgagttcaacgtatatacgtttccggcattcatggataatgtgccgactaaaagaatagccgaggtcaacaagagtaggcggaaagtgaagctgtttttcatcattagtatattatttgattgaatgcaaagtaacggaaaaaaagaaaaagagaggagttcaatactacaatgcaatgaaacaattgtccaattaaccgaataatcaaggttctccaagcctccttgtactattctgttatcggaatagactatttttcgggagatgtatgcttgttgaaccactgcttcttatcaaagtcagtaactaaattagatctgcgcaaagtcttcataacaaataagattgtaacacacaatcttatttgttcttcccgttttcacccatttggcaagtgttgtaataaatcttgatagggatgccgtggcaaatccagtgaagacatatttaaaacgggaaaaaactcattcatgacatagaatatgccaccaaaagggttggatttatgaaataatgattagttgcggatttaaggatatataagtttcttaaaaagtaatcggtcaacataaaaaagatagtaacttcatctccctattctagcattcagaacaatatgcatgatagaaatatagtccaaactagtatgataattatctattgtaaatacttaaatggttgataatcaataaacgatctgtttccctttacttcaaagactatcagacgattcttgcattataatagattttatttccacttcttttcctattaattcccttactttgcatctgttgatttactgaataatattaaaaacataactatatttatgagaaacaaattgagatccctttgctgcggtaccttattaatgactgcatacgcatgcactacagtctatacgaaaccggatgctcctattaatgaagttccctttacccaagtccatcttaatgatagtttctggactcctcgtattgagacgaatcggatcgtatctattccctctgcatttaaagaatgcgagaagaacggtcgcttcgataactttgccattgcaggaggactgatgaagggagagcaccgcggagacttttctttcgacgatacggatccttataagataatagaaggagcttcctactcattggcggtgaaatatgataaaaaattggatgcctatctagacagcgtaattcatttgatcgcttcagcacaagaacctgatggatatctgaccacttgcgttactaataaatgctatcgactctctggctggtggggcagacagcgatgggagaaaatcaacagtcacgaactttataactgtggtcacctctacgaagccgctgttgcccactatcaagctaccggcaaacgaacattactggacgtggcaattaaaaatgctgacttggtatgcaaagtattcggtcccaacgaaggtcaaaagcatgttccatccggacatccgattgtagaaatggccttagctaaattatataaggtgacaggaaacagcaactacctgcaaatggcgaagtacttcgtagaagagactgggcgcggaaccgacggtcatactttgaatgaatatagccaagatcatcaaccgatcctgcaacaagacgaaatagtgggacatgctgtaagagccggatacttgtattcgggcgtggcagacgtagcatcgctcactaaagatacggcttattttcacgcactgactcgtatttgggataatatggcaagcaggaaactttatattaccggtggaatcggctcccgtgcacaaggagaaggcttcggacccaattatgaactgaacaatcacaccgcttattgtgaaacttgtgccgctattgccaatgtatattggaaccatcgcatgtttcttgcaacgggagacgccaaatatgccgacgtactcgaacgtgctctctacaatggtgtcatatcgggcgtatcactcagtggtgataaatttttctacgataatccattggaatcgatggggcaacacgggcgtcaacgctggtttggctgtgcctgctgtccgggaaacattacccgctttatggcttccgttcctcattatatgtacgccactcaatctaatgatatttatgtgaacctctatatacagagcaaagccgatatagaaacaaacaacaatcaggtaaaactggaacagaccacccgttatccgtgggatggaaaaatagctattaaagtaactcctgccaacgaacatgagtttgccatgcatctccgtattcccggatgggcacaagatgctcctgttcctaccgacttgtattcttttacggataaagctcctcaatacacaattacagtcaatggaaagaaagcaaaaatgcacattgcagatggttatgctacactgctcaaccgctggaaagcaggcgatgtgatagaaataaacttcccaatgaatgtgcgacgcattaaggccaatgatcaagtaatagacgataaaggtaaactggcaatcgaaagagggcctgtcatgtattgtctggaaggcaaagatcagacaggcaacacggtattcaataagtttatccccgatggtacaccgatggaagctacttatgacgctactttgctgaatggtatagttgtgctcatcggtactgccaaggaagtacaaaaagatggcagcattaaagaggtgccattcaaagctatcccctattctacttggaacaaccgtggctctgaccaaatggcagtatggattccggaagcagatgaatatgcccgcatcgatccagaacctactattgccagcaaagcaagaactttaatgatacaggctccgattcaaaaggatgctcctgctcctgcttctgctgctgtcgaagcttgggcatggggggtaaacgaccagtgggaaccgcgaagttcttcggataactcgaagccttatcattattggtggcttaagaaaggtacagcggagacattagcatacgattttgatcagccctatacggtttcaagtgtccaagtttattggttagatttcgatcattatgatggagattatcgtgtgccggaaagttggaaactctattacaaggcaggcaatgaatggagggaagttgaggccttgacatcatatccggtgaaaaaagactgttacaatacgcttgacttccatccggtgaagacaaaaggactgaaaatcgtagcacaactacagaaagataaatcgggaggagtgattgaatggaaagtgaactaatcatgtaatcaagtagctattaagaaccttttaaaactataaaatatgaaaaatagaaaagcatgcatcatgatcgcccttttactgggaatgcagacagtatttgcccaaaaggctgattataatatcaccccgatccccttcaataaggtacgcctgacggacagtttttggactcaacgagttcatacgaataaagaagtcaccatccccatcgccttctcacattgtgagtcgaccggaagaattgataatttcaaggttgccggtggattaatggaaggtaagtttaagtctgagtctccttttgatgattccgacgttagcaaggttattgaaggagcagcctacgcattaagcgcagacgaagatcccgaattggaagcctatgtagattctgtcatttcgtatatgaaggcggcacaagaggaagacggctatctatatacctaccgcacaattatgggaaatgattctcacccttggattggaagtaagcgatgggagaaaacacatattttgagtcacgaactctataatctgggacacatgtttgaagcgggagtggcttattatcaagcaacacataaacgtgaactgctggacgtctgcatcaaagctgccgatttattatgcaaagactttggctgggaggcgcttcaaacgtttccgggacatcaggaagtagaaatcggattggtgaaactgtatagagtcacaggagaaaagaagtatctcgatttagccaagttcttcttggatgccagagggaaatgtaatcttcccggagatgcttataatcaaagccataaacctgtgatagaacaggatgaagcagtaggacattctgtccgcgcgttgtatatgtacactgctatggcagatgtagcagccctgacaggagatatgagttacattgaagcttccaaaaagttgtgggaggatattgctaaaacaaagttgtatatcaccggtggtgtaggtgctgccggaggtcacgaagggtttggaggcaagtatgaacttcccaatctgacagcttattgcgagacttgtgctgccatcgctaatgtattctggaatgaacgtctgttcttgctcgaaggagatgctaaatatattgatgtgcttgaacgggcactttataataatgtattgtccggagtatctgtttccggagatcggtttttctatcccaatcctttagaatcgaattatggtgcgaatcgcagtgcctggttcggttgtgcttgttgtccgtccaatgtcagccgatttattccttccgtatcgggatatgtttatgcagtaaaagatgatcagatctatgtgaatttgtttatccctacgacttctacttttaaagtaggtaaacgtgacattaccatcactcaaacaggaaacatgccttgggaaggactaacagagattacggttgcccctgccaaacgttctactttctctgtaaaagttcgtatcccgggatgggcacgtgaagaggcggcgccagataatgaattgtattgctttaaagataaatctgcaaagaaaacagtggttaaggtgaacggacaatcagttcccattcaattggataaaggctacttgaccatccatcgcgaatggcgaaaaggcgataagattaccgtcaatttcccattggaggtacgcagagtggcatgtaacacgaaggtgactgctaatttggataaagtggctttgcagcgtggccctatcgtttactgttcagaagggattgacttccgagaaccgcgaatactcgatattttgcttccggatacagctgctatcagttgtaagatggatacactgttgaatggcatgattacgcttcatgcaaaagcttatcatacccaacgagattccaccgggcagacgaatctggcggatagaatagatttcaaggcaattccttattacgcttgggcgcagcgcaaaccgagcccgatgttgatgtggtatgctacgacaaaagatgcagctaagcccaaaccggcagccactattgccaatctcagtaaagttgatggttcagtcaataatatgagtatagaagcaatccgcgaccagcttttaccggcaggttccaatgatcataatctaccgttctttcattggtggcctcattccaatcagacggaatgggtgagctacacattcgataaaccttatacgatttccaaatcaagaatattctggttcagcgacggaggtggttgtaaagcgccattaagatggagactttattatgataataatggtaactgggaagaagtgaaagccaagaatgaatatggcatacaactaaatatcatcaatacaaccgacttcgaacctgttactaccaaagctgttaagattgaagtggatctcccccaagattgcgccagtggaatacacgaatggattattgaataaatagaagaatgaatatgagaactatcttctttataatatttctcactctatgcctcgcactgtcatttgggcaagaagtgaagtacaatacgccgcaagcaggcaatcccattatcccgggatactttgccgatcctactatccaaaagtttggagatacttattatctctacgctactacggatggaaatggtggaggactcggtccttcacaagtgtggacttcaaaggattttgtgaattggagcatacaaccgatgaactggccgaatacacattatatatgggcaccggatgtaatgaagggaaaggatggcaaatattatatgtattactgccaaccctgccaaatctattgcggtgtatctgatactcccgtaggaccttggaagaatattttgggagaagaagaagccgttttagtgcccgaccgttatgtgaagatgtccatcaccctcgacgggcaaacatttgtggatgatgacggctccgtatatctctattggggtacttgggggatttatcccaatcatggttgcggtgtaggcaaactgaatctggacatgaaatcattctcggataccacactcatcccgaatacacagattactgacttcttcgaagctccttacgtatttaagcgtaacggcatttactatttgacttattcttcgggatcgtgccatgacaatacttaccgggtccaatatgcaacgagtaaaaccggcccgatgggtccctttacctttgctgataataacccgatacttgctaccaatgcagatgaaaccattcacgggccgggacatcacagcattcttaaagaaggggatgattattatatcgtttaccaccgtcacaatattccacagtctacaagaggaatgcaccgacaggtcgctgccgacagactggtattcgatgatgaaggccgcattttaaaagtggaagcaagtcacaaagggataggttatctgcaaaagaataccaatccttatcccaatctgttgttgggaaagaaagtgcgcgcatcttcctattacaatgaagacttcgtgccggaatatgccattgacgacaataatgccacactttggcgcccgcgtacttgtggcgaagaatggatagaagtcgatttaggaaagaaaacatccattaccagagtttggacacagtttgaacatgccacctcattctaccaatatctgattgagacctcattggacggaaaagaatggacggtcttttccgacaggagagccaacacacaagccggaagtccgatgatggatgcagggaaggcgaaggctagatatttgcgtctgacgattaccggaaacgaacagaacggtttgtctggagccatctggaatctgaaagcattcaatggggggaagaatcccgtttcatttgccgatatgacttttggcagcgaatcaaccgaagcagctcctcaaaggaaaggattgatcttcgaaatcaatgcggacgattatccgatgaaggagagtatttcccgtcttcagaacaggaaagacaaaacaaaaggatttaatgctattggtcagaaagttgccgttcgtcctaaagataataaatctgctttcatttttaatggaatgcaggaattcagatctgatttctctttgggaaaagcattcactggaaatagcccttatacactgatggcatggatttacatggaaaacatctctacaaacgagtgcatagccgacttgacaaatgtaggtggtgaacttgaaaaggtagtattgggatacggtacagatacgcaagccggtgtagtatcccatcacggtagttttgaagatatgggactgccgggattgcaagcaacaaaaagatggactctattgtccgtcacatttgatggctttatggaaagaatttatttggatggcaaattgatgaaagagaaaaatgtaatgttaagactgcctctgagtgactttgttacgattgggaagaagtatggcgaaggacaggctttcaagaatagcatgcattcattggctttgtatgacctccctctgactgctgacgaggttgctgatatttataagaaaggaattccggattcaccattattggctgaaagccaagatatgaatgatttaaaatctcttcaatcatttctttcagttagggccgtatcttcatctatcgtaagactaggcatgaaaatggataccaatgagtttggtctctctttctcttttgagaatctgaccacaggcaaacaatccggttggatcaatgactttgagtatttcgatacctctttgcaaccgggaaagaaatacagctatcgagtaagagtgaaggatacgtttggcaatataaaagagtttgatcaggtagaagtatctacggatgaaaatcagttccaagttatatacgatgatttctcaaagcaatacgattttgtgaaagcagctgataagaaaggtatttgggacggtttgtcaggctatcaattggatgaagtgagtgcactgacagatcagggacaactaatgataaagtcagccggtcgtaacttccaactgccgggcagagataacggaccttttctatataaagaagtagatggtgatttcttggcagaagtggagatcgtagatttcagtggaatgaaggaaaagaaaggtgtctcttttaatgaaggcggactcatggttgctttgcgggaagccactactcgcgggggacaagaacttatacatttaggaacattcccttattataatgtaggcaatatattgacgctgctttctcatgggcgcattcaatacaagaatgataaaggatgggatctggagcgtttcttacaagtggagcgaagtggaaaccgattctatttcagaacgagtacggatggagcgcattggacaaatatgccgggaagtccgatcgtctattcggtaagtccggatcagaaaataaagcttggattgtatcaggtaacctatactccggaggaaggatatgtggcttttgataatttcaagctatggatagcacgttgatacgcaattaattaattaatttaatctataacattaaaatcttttaagtatgagaagcatttacaggttattaattctaggtgcatttctgtaccattcgcaattatcggctgctattccgataaatgcatccagtccggaaccggaagccatcacacaaggaaagttgaccataaccggggtagttattgacaaggcgaccggagaatcactgccatctgttgccgtcatggtaaaaggcacttctgtggggtcgcttactgatgctgatggaaagttttctattcaggttcccgatcggaatgctacattggtcttcacttttgtctcttatcagaaaaaggaaatagccgtaggcgataaaaactttataaaagttactatggaagaaaacgttcagatgctggatgaagccgtagtgattggttatcagtctgtagccagacgtaatgtgcatggagccgtaaccagcataaaggcagatgatttgcagggaattactgctccatctatcgatattatgttacagggggcagttccgggagttaatattcagacattctcgggagagccgggcggaagaaatacatttacggtgcgcggtaatacggaagtgagcagtgccgatctgaccagttcgccgttgattgtattggacggtgtgcccgttgacccatcggtggtaggatacagcgcctcgagtgccaatttcttgtcaaacatcaatccgaatgacattctcaccttagacttcttgaaggatgcggcagcagcagctatctatggttctaaagcggcaaatggcgttttgattatcacgacgaaaagaggtaaagaaggaaaaccgcgtatttcttttaatggtcgctttggtatcgtgacaaagcccgttactcctaaaatttatatgggcgctgccgagcgtagagcaaaactagatcaaatggctatctatggcaatgagaataatttggaggctactcctcagatattgacggatagtattaacccgatgtttaataatgcaaccaattggtttgatctcttttacaagaatggggtggtgcatgactacaatctgactgtttccggtggagacgagaaagcaaactaccgcattggaggtggatattataaggaggaaggtacgatcattggaacaggatttgaacgtttctcgtttaccggtaattttgtgaataaggtaggtagcagattggaactgaatacttctgtcgcatacaatgtcaatcaaagggaacctgtccccggcggaaactctgttaataatgctattgggatggatatatccaatatgccttctacccttcttcaactgacagacattgatagaaacagaatgctgggctcttatgagcaggccatctatgacaatagtgacgatatgatacggttgagtgaacaagcctcgtatgatatattgaaaggaaaagtcttatccttcaacactcagttctcttatgtaaaatcaagttctcgtttggataaatccgagccaagtacggcaaatgtagataggatgtcctccgctttgagtgagagcagacagatgactacttggaatattgaaaactattttacgtttaacaagatattcggtgcccattcggtcatggctctgttaggacagtctgccgagggaattactagtaagtatagtagtatggaaggcaggtatttaagttcagactatattcatgtggtaaatggagtgagcaaagataatctgacagcttattccgggatagaagaggcgaaagctgcttcatttttcgctcgtgcttcttatatctttaaggaccgctatagtatttcgtcctctatccgtaccgacgggtcatctagatttggttctaaccaacgatggggaacctttcccactgctagtgcattttggctcgtttcagaagaaccatttatgaataatctaaaggatgttgtctctttgttaaaatttagaggatcatggggaaagtcgggttctttaccttccggtttctatggacatcataacaggtatatggcagcctcatcaacatacgatggcggtggagcgattatccctaactttgcagatggtattgcgcaaaaggagttgacatgggaagaaactaaagaatgggacttgggaatggacctggagttcttgaatggacgttttactttgattgcagatatttataacaaggagaaacatggtattttttatagtttcatgcttcccaagacttccggctatgagaaatactacaccaatgcagtagctgtaagaaatgcaggtgtcgaactagctttagtggctcgtgtccttccagctacttcaaaatggcagtggaatattaatgcaaatatttcatataacaagaaccagatcatgcagcttcctgatggaaataagactgtagtggaagataatagatatttgatggtcgggcagccaattaactctttccgcttgtctcagtataacgggatctatttaaacgaggatatgatacctttcgatccatataccggtttgaaatataagaatgaaagtgggcaatatgtacaagtaggttgggctgattatgaagacgtagataaagacaatcagtatgtctcttggaaagataagaagccaattggtgatcctaatccgaaatgggtgggaggattgaacacaaatttgtcatacggaccttggagtttgtttgttcagacttcgttcacattaggacgagatattctgaatacacagtttgccaaaacaatggcacccctctcggcacaatatggggcagatgaagaaggagttggattctccggcggaccgggagccaactatgcgaatcctgcagatggacattggtattatgcagaagactttgtggcacgccgtatgatggttgatttaagtcgttacagcttttggcagaaagacggtgataatacgaattatccatctcgcagccaatatatgaacaataataactttattgaaagatcatctctatttcttgaaaatggttcttacctgaaactaaataccatcatgctttcctataatctcgataaattgaagaaatggggcattaataatgcgagattatctctgactgcagaaaatgttgctattataaagagtaaaaatacacttgcggctgacccaagtaatgtatctccggatggttattatacaggtaatggatacgggcttccacggaagtttacaattggactgatgtttgatttttaaatttgaaaagtatgaaaaagataataataatgtctgcaatgagtatactgctggggttgtcctcatgtgatgatttcttgactaccacccctaatgatgctcctacgcgtaatgtcttttggacaacagaagcggatgtagcagctggaaccaatggaatgtattggctttttagagatgtaataatgactggagaaggagaaagagtccttacctatggtgatcagcctacaggtctttggagtaacttgtcacagataaaccaaagtccatctcaagggaattatcaatacacgtttaccgatacctattttactgattggtctcaatactataaaacgttgaatgtggcaaatgtggttataaattctgttccggatattccttggaatgaatttgatgaaaatcagcagaatggaatagcagaaaagaatgaatatattggtgaggctctttttgttcgtgcttatgtctatttctttatggttcgtctatggggagaagttccgtacgtaacgacttccgtatctgacgcttcggaaacggttagagatataccaatggagacagaggagaatattcttactaactgcctaaatgatttgaaagacgcatacgattatttatcatggaatgatacacatggactacgagcatcgaaagctgatagaggtgctgtccaagcactacgagctcatattcttatgtggaagaatcgcaaaaataaatctgtgattgaccctcagaattataaagacgctattgctgctatagatgatattgaacagtcaagcaaatatgatcttcaaaatatggataattatctgaaaatctggaatggcggtggcaagtcgatagagtctatcttcgagtttccttatagtagaggagatggtgaaaagttctcaaaaaattctattttttccagatttctaggttatccgataaatacggatagaattaatgaatcggtatttaaatatgaaaaatcattcttagatataattgataaatatacagcgaatggagatagaagaagaaccgactgttgggaacgttggggagaagagaaattccagtataccaaaaagtattcgagcattacatatcttgacgtagacaagctgaattgggagatggataatacatttgttctgttcagattgagtgatatgtatcttcttcgggcagaagctcattacgaattgcaagaatatgatctggcaagagcttatttaaagaaaatacacgaaagagcaggcatctcagatactgtggctgataacatcccggacgatcaactcggcactgaaatttgcgaagagcgaatgagagaactttatctggaaggacataatctatacgactgggtacgcaacgggcagtatgccggacgaaatggctacacaatgaaccggtacacacaagaaggatacttatggccggtgaactctacgctgattattgacaaccagtatgtacatcaaactccttattggactgacaaaatgcaataactaacatcctaaaaaaatgaaaaccatgaaatttataagatttatattactgctaattatggtatcacctgtacttgtttcatgcggtgatgatgatggagaactttcgagtgcttatgttgattccattacaaccgattatctgagagcaaatcggtttggaatcttctcaatgtctcttgacttgtttgagaaagccggatatttggacttgctggatcagaaaggtgtaactgttttcatgccgaccaactacagcattaaacactatatgaaacagaaagaatacatgttgcatcaagaaaccggcaatgaaacacttacgtatacgtatgatgatttggtaaaagacttgcccttatttaaggattcgctaaaaatgtatattgtagagcagcaggtgaatcgttctgatctggagaaaatgtcaggtgaggctgtcaccctgaagtgcatgctggggtgtgatatgaatatcagtttgaagaaaacgaaactttataccgagaatgtacccaattctgttaataaatacctgtactatacatttataatcaacggattggatgaaagctccaatgtcccactacaggacaaggatgtcagcaactattgccaaacatccggtttgattactaaaacaggtattttacatgtgctaagggatgaacatccattgttctttaacagatatgaatataaataacaattaaaactgagtacttatgaaaagcaaatatgtgagttgcttgtatattgcggcaatgctttcttctatgacaacctttataggctgtgaagaaattcccgacggatacatttctgataaaataatatatgtacagaatccttttgttgtgcagaaagggattgagattaccacagctccacctaatattaatggaacctcctaccctttaaaattcagattattagaagcagagggccccgatgggcaaatgactacgattttaaccgacccaatagcaaccagagtatgggaaaagccgtatgactttaaaacagataaaacgattgatgcgattaataaaaagataactgttatcaatgcccctgtgatgcgtatatcagaatcgggaggacaaataagtttctcatctgcatctactgcggttccttccggtgagtataaaatatcagtagagatgtccaactctgcaggaactcgagtctataaggatattttcgttgctgctatccaagaaagcgatccttactggatgttggatggaggagagggagcatactcttggaattcgcaagtgggaagttgggggcccatagaagctgccggaatctacgattttaaacatgatccggacggtgagaatgaaatcgaatttatagtatgtgacaagaatgataatccttttagctggaaagacggggaaatagtgaacagagggacagagcgtagcaaattggaagatgtatgtttcgaaactcccaattacaccgagcgatctgccatctttaaatatccgtttgctccttttccgtttgccccgggtggaggtgagcaatatcaatattgctatagaatattgggtaactacttgaagtatgacgatgagactcgtagcggatacatgaatctggtcgtgaatttcagagtattgcttgatgggaaatggacaattaaagtgaaatttcctgcaattacccgcatgcctaaaaacggctgatgaataggttagtttatatatttattgttctgttgctgcctgccattaaggcggcagcaacagtcaagttgcatagcctgttttcagacaatatggttatacaacgtgaacttcccattcatatatttggcactgctgatcaaggtgaatcaatcacagtcacgtttgggaacgcgacagtacatgcggttgctgatataaaggggaattggtctgttgagttgccggctcaggaagtatgtatgataggacaaagtttagtagtagaaggaaagacgaaaatcgtgctgcgtgacatattgattggggatgtctggctttgtagtggtcagagcaatatggaaatggcactaggaagttgtaacgattcagttgccatcaaagaagcggattattctacaattcgctttgtgcgtattccctatctttgcaaagatagtccacaaactgatatggatgtcgaaagattagcatggaatatctgtacgccgtactcggccggcggatgttctgccgtaggtttctattttgcccgaagagtctcaaaagaaatgggagtacctattggaattcttatatcaagcattggcggcacaaatattgagaagtggatgccacaatccagttttttccgaaatgcgatattaagtgaatattatcagaaaatagaaaactggatggagcaatatcggaaagatttagttacttttcaagcaccgatgaaagaatggatgaaagctgtgaatgaatcactcttgaaacatgaagatattccatcaatgccttatgtaccattacatccttctatgccaggttcaaaatacggaggagggcagttctcgcatttatacaatggaatgatttctccattataccagttcaaaataaagggagcattatggtatcaaggagaaaacaatggtgaggaagagcgcacctatgtcgaaaaaatgaaagagatgatagctgcttggagaaatggttggggatatgagttccctttttatatcgtacaattatccagctggctcaagccggttaatgatcctaatgattggaaaaaaggttggcagttctgccgagcggcacaattggcttgtgttacagaaataccgaataccggtattgccgtgacgtatgatattggtgatgaagaggatatacatcccaagaataaatatgatgtgggtgaaaggttggctctctgggctttagcccatgattatggaaaggaaatatcttttagcggtccgctctataaaactataactttagaagaagatagaattcgggttaattttaattattccgaggatggattgatgattggcagaaaagaaggaaaaaaagaagtggaggaagataagataggtaaactgcaagggtttgttatagctggagaagacaaagtgtggtattgggctgatgcaaagattgaaggaaacagtgtgatagtatcttcaccgtttgtcaataaaccaattgctgtgcgctatgcgttctcaatgaatccgcgaggtgctaatttatataatcgaagcgggcttccggcctctcctttccgaagtgattgttggtaaataggtttttagtaataactatcataataatgaaacaatttttatttgtattaagtatattaatgagtggtatcctaacagcccaaaatgttcctttgcccaccggtaaagccatctacatccccaaagacctgcaacaaatggatttgcagaatccggatagtaaatggagctaccatcgaatggcgcatagtgagaactttgctgtattctgggaaaaaggttttggaaacgatttatcatcacctcctccattggaggggcattcgatgaaggtcgatctaccgaacttgttgcataagttggaaacattttatgtttatttccgtgatacattgaaattcgttaagccgggttcgaagagtgagaagtaccggatgatggtaatgctgaattactcattggaaggcactgcctacggaggcgattacgaccaacagataggtgcactatggatagctcccaaccggatacaggataaaaagctgaattgtattgctcatgaattgggacacagctttcaggcacagatctcttgtgatggagagggggaagcttggggaggtagcggatttttcgagatggcttcgcaatggatgctttggcaagtaaaccccgattggatcacggatgaaaagtatcattgggaagccttcatgacactgacgcataaagcgtatctgcacctgaagaacatttaccattctccatatgtgctcgaatattggggaacgaagcatggcttaccttttatcgcagagctcttccgacaaggaaaacgcggtgaagacccggtaatgacttacaaacgactgacaggattggaccagacacagttttgtgatgagatgtttgatgcctgccgacattttataaattgggattttgaacgggtgtggaaagaaactcgtctgtatgctaatcggcatacttgtaagctgatagatgaaacctccggttggcacaaggtggcgcctgagaattgtccggagaattatgggtataatgcgatacccttagttgttcccgaagcggggaaagaggttgaggtggaattcagaggagaaaggaatggagaagaatatcatctcttcaatgtggagaaagccggttggcgatacggatttgtgggagtaacggaagacggaaagtccatttatggagatatgagcagagacgaaaaggataagatacgttttgtgactcctaagaaacagaaactagctcatttgtggctggtagtgatgggtgctccgacgaaacattggatgaatcctcaagataagcatgaggatgcgcaatggccttatcgtataaagctgaaaggtacgaagctgttgaaggatcatctgttatctttttctctaagatttgattcttgatgcactaagatttataagcaacaggaactaaaaccatcagcggtaagtagtaaatttgccatcaaactgattagagtattacagtgtagagatagtatattacttccgccagcgggctagagtggtaaggtaattgagtgccggatgaaactttctgctgtttaatttagcttgttttctggaaaaatagtaatcttgcaattcatttaataaactatagctggaagtactatgaaaaggcttattatattccttttattggtttcttattttgtttcctcctctgtgtttgcaggaaataaagatttcaattttcgtcgcttcacggcagcagacggtttgtcttctaacaccgtgcgggccatcctgcaagataaacgaggatatgtatggtttggcacggacgagggactgaatcgctacgacggtacgggggtaaatatctaccaatatactactcagacaacccacggtctgggatgcaactatatttccgctttgtacgaaggagaagatgaactgtgggtaggcacaggcgagggtttatatctttatgcttacgacactaatactttttctttctttgaaaagcagacatcgaaaggtaaacagattacgactgccgtcaatgatatcaagaaggacaaagaggataacctatggcttgccactagcgggcaaggggtctttaagtacaatcggcagatggacaaattggaacaatatgagtttactgcctgtgtaggctttgtgcccggactatgcattgataatgaaaattgggtatgggcggtgacgaatcaaggagatcggtatatctacaaactaaacaaagcggaaaacaagtttgaaccatttgaactaaaatatgaggagaaacgatacaaatctccttccattgtggcttttgaagatacagaacataatttgtggctgggtacttggggagatgggctgcaaaagattgaccgatatagcggacaggtgactatctacctccatccttccgaaaaagaaggaatcatgcacatccattctatcatgcaatatgctcctcaccaacttctcataggatctgacgacggattgagcagttttaatacctccaccggtgagcacaaactctactcttacgacgaggtgaatccttcttctctttccaaccgtttcgtatatcctattatgaaggatcgcgagggcggtgtatggatcggcacttactacggaggtgtcaactacatatcccccaataccggacaatttgaaagttactctcaatcccgttttttcaattcagtaaaaggaagcattatcagtcacttctgcgaagataccaatggcaatatatggattgcctcagatgacggaggcttaacttgtttatcaacagccgataaccgcttcattcattatatgccccaagaaggaagaaatagtctgtcttatcacaacgtgcatgctctttgtatggatggtgacaatttatggataggaacctataccggaggagtaaatgtattgaatgtccgtaccggagtatttaaacaatatacgtcttatcaaggtgatccgaaatctctggacggtagcagttcatacgccatattcaaagatcgcgagcaacgtatttgggtagctaccatgtcggggatcaatctctataatcgtgaagaagacaactttatccgtgtaaagcaactgggagggttaacgatagatattgatcaggatacgaaaggtaacctttggttcgctacacaaggacggggattgtttaagtacgacccacagacggatagttggaaaaattatcagcatagcaagcagaccggagcattgatcagcgatcaagtaaattgcgttttggtagatcggaacggacagatatgggtcggcactatggatggactttgccggtatgatgttgaaaaagatcagttcgatccgatagcgctggacataccaagccacaatatttgctgtatcatcgaagacgagcgcacgttgtggatgactacgacgaagggcttggtacgttatattccgggagagaactatcaggtattcatgaaaagcgatggtttgcaaagcgaccagttcatgcccaatgcaggaatgaagacttcgaatggaaagatttacgtcggttcggtgaatgggttcaatgccttttatccttttcagattcattctaacgagcagattccatcggtggtcatcacgggactggagatttttaataaagaaatatccgtaggagacaaatggttgccccgttctttggactgccttgatgagttgaagctatcttataaagacaatgtttttagtctgcgctacgctgctttgagttattgcacgccggagaagaatcagtatgcgtataagctcgacggatttgataaagactggaattatgtaggcgcacagaacaaggctacctatacgaatcttccagcaggaacctatctgttcagagtaaaagcatccaataatgacggattgtggaacgatcagggggtaagtctgaaagtcgtgatctatccgcctttctactggacgactgctttcaagattctctatttcatccttttgtgtgtggctttaggctattttattcgttttatgttgaagcggaccgagaagaagcatgttgccgccatgaataaattgacagaaaataaagagaaagagatgcatgaagctaaaatcaagttctttacgatgatagctcatgaaatacgtacacctgtctcactaattatcggaccgttggagaagattcgcagatctacgtttgtattgcccgatactgtgcgagatgatttgaatattatcgaccgcaatagtcaacggctgcttgttctggtaaatcaactactcgattttcgaaaagtagaacgtgaggggattcgtatcagatgcgttccttattctgtttatcagctgctgaaagcggtaagcgaacgttttgaaccgacaattgttcaacaaggcgggcaattgaaggtgaattatccgaatgaggatttcgtagcagtcatcgaccctgaggcaatcaccaaagtaatcagtaacttactgacaaatgcaagcaaatatacaaagaatgaagtggtcctgtcgtgtatggtaaatcaagaatcatgtacatttaccattaaagttacagataatggtatgggaatcagccaagaagatcaggagaagatatttaaacccttctatcaggcggtggataataagccgggtacagggctgggactaagcattgtgaaaagcattgtcgatgctcataagggtaacattgaagtgcagtctgtggtaggtaaaggctcttctttcgtagtgattttacctatagaatgtgctgaaataggtgaacaagacagtagtgcagagaatgctgacacagttctcccaaaagatattctatcagacgctctgcccgttgaggcagcaaggcataaatcggtgatgctgattgtagatgacaataaggagatgctatctttcctctcaaacagtttctctgaccaatacaatatcctgactgccgaagatggagggcaagctatggaaatattgaaagagaatgatgtaactttgattgtcagtgactggatgatgccacgcatgaatggaggagaattgtgcagagcagtgcgctccaatcagacgatgagccacattccttttattttattaacagcaaagacggatgttaattctaaaatcgaaggtatgaattgcggagccgatgcgtttattgaaaagcccttttctttacaatatctggaggcttgcattaaaaatattgttgatctgaggaaactgttgcggcagaaattctcagaaatgccattaatgccgcttaatagtattgcaggaaattcttccgatgagaagtttcttacaaagatgaatgaaatcatcgagcagaatttctcgaatcccgaactgtctgtagattatctggctgagcagttatgtattagccgttccggattgtttgccaagattaagtctttggcaaatatcactccgaatgaattgatacagttagtcagattgaagaaggcggcggtattattgaccgagaatcaatatcgtattagtgaaataagctatatggtgggatttaataatccttcttattttgcaaagtgctttcagaaacaattcgggatgaagccgggcgaatttctggagaagtcgaatgagcaaaggataaacggggaataactttttttagctgtctgatagaatgtagtcagatggttgaaatgaagcggctcccttcatcccgaagagagccgcttatgcattcactaaaaaattatgaaaaacaaacgctgttttgctgttatatatttaaatagttagaaatctatttgggagaatgcttttgtcgggcagatgcttgttgagcttgccacttttcgtattgttccgtggtcagaatcttttttatctttttctctttcgtttctgcagctttcttttgtgcatctgcagagtcctgttctttgttcatcataggacgttctcccataccgccggggaaacctccttcgcccatcattggaggttcgccgccacccatcggcgggcggccgcctctcattcccggacctcccattggcggacgttgttcgccggagttctgcatcgctttgaaatgttctttctgttctttcagattcagtttatagattttcttatattgtttttctgtcagttgaagtgattcctgcatttgatcagtcatctgagtcgctatcttttccggattagggacttcgcgtgggaggcgttgttcatgttgctgtctttcctgtggttcaggattttcttgtgcaacagccagactggtgcaacttatcaggcaggctgcaagccctatcagtttcatgtttcttttcatcttttctctttgttaattgatttaatatcccaaagttaactggttcttgaaacagatgaaaatgaaatcgacaaaggacggagttttgtctattaaatatggtgtcactattctgtagtgatggtgtaagtatccatgtcggactgaaaaaggaaaatatgaacataaacagtcgatatatggatagtctcattttgtcgcaagccattaaatttgtgcctgaatatagaacgattattatgaaaagactattgttcatttttacctttttttgcctccctgccattcatggaggcgcacagaatattctgactctggagaactgccttcgtatggggattgagaacaatctctctttacagggcaaacgaaaagcgatgcagaaaagtaagtatggcatttcggagaatcgggtgaagctgttgccgcaaatcaatggctttgccaactttaatgataatatcgatccgcctgtctcagtaactgacggttcttcctatggagtaccttataatattacccgaacgttgcaatatagtgccaatgccggggtagaattgcagatgccactttataatcagactctctatacttcgatttccatagcagagattgtggatgagatgagccggctttcgtatgaaaaggcacgggaagatttgatcttgcagatcagtaaaatgtactatctgggacaggttactgcggaacagattgcattgataaaagccaatatcacccgattggaagaactgagagatatcacacaggctttctttgataatggaatggcaatggaagttgacttgaagcgggtgaatatcaatctggaaaatctgaaagtacagtatgacaatgcgcaggcgatgatgacgcagcagcttaatatgctgaagtacatcatggattatccggcagaaaaagaaatcggcctgttgccggtcaatacggatagtatcgctacggttgctttgaccggactgtcggaaaacctctatgagcttcagttgctccaatcacaggtgcagctggcagagcggcagaaacgattgatcagtaatggctatattccttctctcaatctgacgggaaactggaggtttgccgcttatactgatgaggcttatcattggtttcattccggtccgtccaatcattggttccgttcttatggagtgggactgactttgcgtattcctatttttgatggcttggataagaagtataagatccggaaagcaatgatcgatatcgaaaccatgaaactttcacggttggatacacggaagaatctgcaaacacagtatctgaatgctgtaaatgacttgatgaataaccagcggaactttaaaaaacagaaagacaattatctgcttgccgaagaagtgtatacggttactaccgaccgctatcgggaaggaatcacttcaatgactgaagttctgcaggatgaaatgcggatgagcgaggcacagaacaactacattagtgcacattataattatcgggtgaccaacctgatgttactgaaactaaccggacagatctcatacttgttcaaataacagataactaattgaatcattcatatggaaacaatgggaaataatacagtctccagtacgcatcaggagaaagctaagaaaatgagaaaattacgccgctggcagattatagtaagtctgtttggagttgctgtgattgtttggggagtaattgaaattgtttttctctttctgggctataagcagacggaaaccagtaatgatgcgcagatagagcaatatgtgtcgcctgtcaatctgcgtgcatcgggctatattaataagatttattttacggaacatcagcaggtacgcaaaggtgataccttgctggtgctggacgaccgcgaatataaaatccgggtgatggaagctgaggctgcattgaaggatgcgcaggcaggcgccactgtgataaatgctaccttgcagactacacaaacgactgcatctgtgtatgatgcgtctatagctgaaatagaaatccggctagcaaaactggagaaagaccgtcagcggtatgaaaatttggtcaaacgaaatgcggcgacacctatccagttggaacagattacaacagagtatgaagctacctttaagaagctggaagcaaccaggcgccagcgggaggcggctctttcgggagtgaatgaagtatctcaccgtcgtgagaatacggaagctgctatccagcgtgctacggctgcgcttgaaatggcacggctgaatctttcgtatacggttgtactggctccttgcgatggcaagttaggcagacgttctctggaagaagggcagttcattacagcagggcaatgcattacatatattctgcccgatacacaaaaatggattattgctaattataaagaaacgcagatagagaatctccgcatcgggcaggaggtggctatcacggtagatgctatcagtaagaaagagtttacaggcaaagtgactgctatttccggagcgacaggttctaaatattcgttggtgccgactgacaattctgccggaaactttgtgaaaatacagcagcgtatccctgtccgtattgattttacggatttatcgaaggaagataatgataagctggcggcgggtatgatggtagtagtaaaagctaaactctgatagccatgccttcgtgtcctagaaattatcctttttacaattgggtgcccaaaccgataggtattattattctgctgttctttttcctgccgattctttcggtgggcggggtatactccgtgaacagtaccgagatgatgagcggcttgggtattatttccgagcatattcagtttgccaattttgtgacttccatcggtatggcggcatttgctcccttcttgtatgaactggtttgtatacgacgggagaaactgatgtgtatcgcaggttttgcactgatgtatgtattcagctatgtatgtgccaaaaccgacagtatctttttgctggcactctgcagcctgctgacagggttcctgcgtatggtactgatgatggtcaatctgtttacgctgatcaaatatgcttttggcatggaggcaacgcgtaatattactcccggcatggaaccgaaagacgcgacgggatggaataaactggatatcgaaaaatgtatcagccagccggtagtttatctgttttttatgatcctggggcaaatgggtacggcgctaacggcttggctggctttcgaatacgaatggaaatatgtatattattttatgatgggtattctgctgctgtccattctgatactgttcattacgatgcctaatcatggttttgccggacgtttccctatcaacttccgcaaattcggcaatgtgaccgcattttgcatatcattgacgtgcatcacttatgtgctggtttatggcaaggtgctggattggtatgatgatccatctatttgctgggcaacggcgatcagtatcctttttgccgggatttttctttatatggatgttacccggcggtcttcctactttattttgggggcgttgaggctgcgtaccattcgtatgggggctttgctttatttattgctgatgatcatcaattccagcgcgatgtttgtcaatgtgtatgcaggagtcgggatgcgcctggataatttgcagaatgcatcgctggcaaactggtgtatggtcggttattttatcggtgccttgatttccattgtattggggtctaaaggggtgcatctgaaatatctttttgctcttggctttttctttctggcattgtcggtaggattcatgtacttcgaagtgcagacagccggactttacgaacgaatgaagtatcccgtaattattcgtaccatcggaatgatgattttatatgcattgacggcagcatatgccaatcagcggatgcctttcaaatatctttcgacctggatttgcatcatgcttaccgtccgtatggtactgggaccgggtatcggaggggctatttattcaaatgtactacaggagcgccagcaacattatattacccgttatgcacaaaatgttgatctggtaaaccccgaagcttctgcttcgtataccaataccgtgcagggaatgcaatatcagggaaagagtgaaacggaagcgcataacatggctgccatgtccgtcaaggggcggatacaggtgcaggctacgctctctgctgtgaaagaaatggcagggtggactatttatgcaggcgttatttgtatgatttttgtgctcgtagtgccttatcccaaacgaaaattgctaacttagtatcgtttttcaatagtaatttatcagtgagtcagtgttatggatactcagcaggaacgtttattacagcttgaccgcgatctgaaaagcgggaagaatatatgcagttcgggaggtgtgctcagttgttttccatcttctttaaaagaaccttttctgatgcaggggcttggtttgattgtctgccggcaaggtagtttccagttttctcttgataataagtgcgcttctgccaaggcgggtgagaccttgtttattcatgaggaatcttgggttcaagtgcttcaggagaccgaagatgtggaaattcttattcttgcctatcagatagaaccgatacgtgacattatcggcaactccgtggtttccatgtatatgtattcgaaacttactccggaactctcttgtgtatggaataccggcgaggaagatgagattatgaagtatatgtctttgatagacagtgtgctggaaatggaggagagtgtgtttagcctttatgagcagaaactccttctgctggcactgacctatcgtatttgttcggtctataaccgtaaattgattagtgccggacaggaaacgggcgggcggaaaaatgagatatttgtccgtctcatccagttgatagagcaatattatatgcaggaaaggagtgtggaattctatgcggataaactctgtttgtctccgaaatacctttcggctctttccaaaagcatctgtgggtatacggtgcaggaacttgtattcaaggcgattatccgtaagtgtatctctttgttgaagaatacgcaaaaaaatattcaggagatttccaatgaattcggcttccccaatgcttcttattttggcacatttttcaagaagcaaatggggatgtcgccgcagcaatatcgaaggaatctttaatcgaaattactctttttctccataagccagatcgcctgcgtcgcccagccccggtacaatataggaatgttcattgatttcaggatcgatggcagcacaccaaatggttgttttgtcttcgggaaatacgctcttgatatgatcgattgcatgttggctggcaatgatcgaagctacgtgaatttcggcgggatgccctttggtaagcatggcctgataactcagttccatactgccgcctgtagccagcatcggatcggtgataatcagcgttttgtcgtcaatacgcggagatgcgatatattctatatgtatatcaaatttcagggtatctttatattttcgataggcggacacaaatgcattttctgctccgtcgaaatagcttaggaagccttggtgaaaaggaaggccggcgcggagaatggtgctgatgacaagctggttgtccggtgtgctgacgggagcaatgcccagtggtgtccggatgttttttactgagtatcggaactctttgctcatttcgtaagccatgatttctccgatccgttcaatgttacggcggaaacgtaggcggtcattctgaacttctacatttctgatttcggatatgtactggtttagaatcgaatttgtttggctaaaatcaattactttcatattatagtttaatcataatttaatctcattttcatcgtattgagaacgttctggcttgcaaagtaaacgataatctttcaaattgcaatattcagtttgcagatattgttaggaatctataaaagagattcaattagggaaaaatttctctaatcccttcttccttttcaaagaaagtattacttttgtacccggatttacaaggaggcacccaaagctcctcatgttcaggtgaaaagagataataaaacgaaataccaattttaattaattcaaaaaaaatggcaaatttagatttaagcaagtacggtatcacaggtgtgaccgagattgtgcacaatccgtcttatgacgttttgttcgctgaagaaacaaaaccaggtttggaaggttttgaaaaaggccaggtaactaacatgggcgctgtaaacgtaatgactggcgtttatacaggacgttctcctaaagataaattcttcgtaaaagacgaaaccagcgaaaatacagtatggtggacttctgaagaatacaaaaacgacaacaaaccagttgacgctaaatgttgggcagctgtgaaagatttggcaactaaagaactttctaacaaaagactgttcgttgttgacgctttctgcggagctaacgaaaactctcgcttgaaactgcgcttcatcatggaagtagcatggcaagctcacttcgtaacaaacatgttcatccgtccgacagctgaagaactggctaacttcggtgaacctgatttcgttatcatgaacgcttctaaagctaaagttgaaaactacaaagaactgggcttgaactcggaaactgcagttgtattcaacttgactgaaaagatccaggttatcctgaatacttggtacggtggtgaaatgaagaaaggtatgttctcttacatgaactacttattgcctttgaacggtatggcttctatgcactgctctgctaacactgataaagaaggcaagagctcagctatcttcttcggtctgtcaggtacaggtaagactactttgtctactgacccgaaacgtttgttgatcggtgatgacgaacacggatgggatgacgaaggtgtattcaacttcgaaggtggttgctacgctaaagttatcaacttggataaagaaagcgaaccggacatctggaatgctatcaaacgcgatgctttgttggaaaactgtacagttaacgctgaaggcgaaatcaacttcgctgacaagtcagtaactgaaaacactcgtgtttcttatcctatctatcacatcgaaaacatcgttaaaccggtgtctaaaggtcctcatgctaaacaagttatcttcttgtcagctgacgcattcggtgtattgcctccggtatctatcctgaacgcagaacaaactaaatattacttcttgtctggttttacagctaaattggctggtacagaacgtggtatcactgaaccgactccgacattctcggcttgtttcggtgctgctttcttgtcactgcacccaactaaatacggtgaagaactggtgaagaagatggaaaaaactggtgctaaggcatacttggttaacactggttggaatggtactggcaaacgtatctctatcaaagatactcgtggtatcatcgacgctatccttgacggttctatcgacaaagctcctactaaggttatgccttacttcgactttgttgttcctacagaacttccgggtgttgatccgaagatccttgacccacgcgacacttacgaatgtgcttgccaatgggaagaaaaagcaaaagatttggctggacgtttcatcaagaacttcgctaaatttacaggtaacgaagctggtaaggctttagttgctgctggtccgaaactctaagccttttaggcaatagatatgtaatgcaaaatgtgggcggttccgaaaggagccgcctttttttgtttatatgaaggtgattttgtatctttgttaatctgaattatgttcgataaaacgctgacaaatacatgattattacttatttgaaactcttttgtacattcgcaaaaatcggcatgtttaccattggcggaggatatgccatgattcccttgatagagcgggaaatagtcaagagaaaatggatgagcaaggaagaatttatggaaatgtttgccttgactcaatcgttgcccggagtttttgcggtaaatatatccattttcgtgggatataaacttcataaggtcagcggaagtctggtttgtgcgttggcgactattctcccttcattcgtcattatgatgttgattgccatgttctttgcccgttttcaggacaatgaggtgatgattcgtatctttaacgggatacgtccggctgtagtggcgctgattttgtttccttgtatatctgcggtcagagctttgcatttgaagtatgtgcaactgatagctcctgtgattgccacagtactgatctggcaattcgggctttctcctatttatgtggtattggcggggatttccggtggattagtgtatactctgtggttgaaaaataagattaaagatataaaggcatgatatatttacagttactttgggtgtatctgaagataggtacgtttggtttcggaggtggttatgcgatgctttcgttgattcagcatgaaattgtagatctccaccattggctgactccccaacaatttacggatgtggtggcaatttcgcagatgactccggggccgattggaattaatagtgctacttatgtgggctatgcagtgacacacagtgtatggggagcggtacttgctaccgtagcggtgtgtctgccctcttttattctcgtattgctcatttcctatttctttgcgaaatgcaaggataataaatacataaaagcagcgatgtccggcttgcttcccatgtcagtggcattgattgcctcggctgccttgttgatgatgaacagggagaattttattgattataaaagtatagggatttttgcaggagcattccttatcacctggaaatgggatttgcatcctattctgctgatttgtctggcaggtctggtgggggtgatcttgtattaaaaaaaactttttataaagctagggttggctactggatcgtaaagaagttgcttaatatgcatgaactggaaatagaaaaagcccgctaaataaaatccggcgggctttctgcattatctcgggctattgcttacgatttgttcgcgcgtttacgctcgatttcgtccagaatgactttgcgcatacgcattgctttcggagttacctctacgtattcatcttctttgatgtattccaatgcctcttcgagtgagaactgaacaggcggaatcagacgaactttgtcatcagatccggaagcacgcatgttggtaagctttttggattttgtaacattgataaccagatcgttgtcatgggagtgttctcctactacctggcctgcatatacttcgtcctgcgggaagatgaagaacttaccgcgatcctgcaatttatcgatggcataggcaaaagcagttccgctttccattgcgatcatggaaccattggtacggcgttcgatttctcccttgtgcggctgatattctttaaaacggtgtgccatgatagcttcaccggcagaagcagtcagtacgttggtacgaagaccgatgataccacgtgaaggcatgtcgaattcaaggttgatacgttcgcccgtattttccatctttaccatttcacctttgcggcgggtaaccatatcgataatcttgcttgaatattcttccggtacgttgattgtcagttcttcgatcggttcgcacttgacgccgtcgatttctttaaagataacctgtggctgacctacctgcagttcgtatccttcacgacgcatggtctcgatcaatacagaaaggtgaagtacgccacggccggaaacaatccatttgccgtcttcctcactctttcttacacggagtgctagattcttatcaagttctttcatcagacggtcgtggatgtggcgtgaagtcacgaacttaccgtcttttccgaagaacggagagtcattgatggcaaatagcatgctcatcgtcggctcgtcgatagcgattggcggtaatgcttctggattttcgaaatcgcagaccgtatctccgatctcaaaaccctcgatacctaccaatgcacagatatctcctgatgaaacttcgtttgtttttacacgtcccaaaccttcaaatacatgaagctctttaattttagatttgaacatatcgccattacgttttaccagcgtgatgttcattccttctttcaaggtaccgcgatgtacgcgacctacggcaatacgaccggtataagaagaataatccagagaagtaatcagcatctgcggagtaccttccagttgttcgggagcaggaatattttcaataatacaatccagtagcggggtaatggtatctgtcggcttttgccagtctgtgctcatccagttatttttggcggaaccgtaaataacggggaagtccagttggtcttctgttgcgttgaggctgaacatcaggtcgaaaaccatttcgtaaacttcttcagggcggcagttaggcttatctaccttatttactaccacgattggtttcaaaccgatttccagtgccttctgaagtacgaaacgtgtttggggcatcggaccttcgaaagcgtcgactaacagaatgcagccatctgccatattcaatacgcgttctacttcaccaccgaagtcgctgtgtcccggagtatcaatgatgttaattttagtaccgttgtaattgatggatacatttttagaaaggatcgttataccacgttcacgttccaggtcgttgttatccaggataagttcaccactattttgattgctgcggaatagatttccggccagcaacatcttgtcaaccagcgttgttttcccatgatcaacatgggcaatgattgcaatgtttcgaatattttgcatataatacctattatttggctgcaaaggtacgaaaataggattagaaataaatgcaatagccccatttttttcttgtaaaacgttgtgagatataaagataatgtctatctttgcacgctcaaaagaataatttactatatcaaaattctaaaaattatgtatttagacgcagctgaaaagcaagaaatctttggaaagtacgggaagtctaactctgatactggctcaactgaagcgcagatagctttgttttcctaccgtatttctcacctgactgagcacatgaagctcaacagaaaagattatagtacagagagagctttaacaatgttggtagctaaacgtcgccgtttgctgaattacctgaaggacaaagatatcacaagatatcgttctattgttaaagaacttggtttgcgtaagtaatctacttgccgcgaaaagattaaaaaccgtttctcacattgagaaacggtttttttagttcgcccagcacgaacatattctaacgggtgtaagtccctaaagcgccctgacaacgggaagtatatagccaacggcaagggtgtccatcgtgaggtggaatctgaaggaagcctgcggcaaatatctggtctgacgtacagaaacttgatattaaggcttaaggatgtggataagtttgctaaacaaaacgaagtcctatagttgtccggaacatccaaagtaaatcaagcagacataagatggaaagaatatgtccataactggggaggtctcacgggcgaggaaaaataaataaatacagtcaagcagtaataacgaaccgtgagaagtcagcagaggtcatagtaaccgacaaggtaaaaaaatcggcagtcggtgaaggactgaacttttaatcaaacaagtaccatttaatactttatgaaagagtcaatgcggaaaatcagtaaaacgaactgcccacaaatggataggacagcatccgacgagtatgtgggagtgcagacttttatggagataaaagatgagcagcttgtggaagtgcaattggaagaaaacaatctgttggaactccttctaagtccatcgaacttgaatgcggcataccgccaagtcgtaaggaatggaggagtgggaggtgtcgataagatggagacgagcgaactgttgccataccttaccctccataaagacgaattgttggaaaagatacgcagggggaagtatcgtccgtcccctgtgcgcaggttagaaattccgaaagacaacggtaaaactcgcccattaggtatcccgacagtggtagaccgctttgttcagcaggcaatcagccaagtgttgataccgctttacgaacctcagttcagtgacaacagcttcggcttccgccctcatcgtagtgctcacgatgcactgcataaggtgcaggaatatgcagaccaaggttatcgctactgtatcggtttggatttggaaaagttctttgaccgtgttaaccacagcaaactgatagaggtcttatcccgaaccgtcaaggacggcagtgtaatatctttgatacacaaataccttaatgcaggagttgtagtatctcacaaatacgcggagactgccgagggcgtcccccaaggtggtccattgagtcctatattgagcaatattcttcttaatgagttggaccaggaattggaacgcagggggcacccgtttgtccgctatgccgatgattgtctgatccttgtccatagtcttcgggcaacggagcgagtccgtgatagtatttccgagtttatagaaaagaagttattcttgaaagtaaacaaagagaagacagaagtcggttccatctgcggcaagaagtatcttggacactccttctactgaagagccgaccgtaaatgtggtcttaatcttcataagaaaagtcaatccaagttcaaacgcaccatcaagcacctgaccagccgtagtagtggtcaaggctacgcttggctgaaactccacctgacgcaatacatccgaggttggctgacatactatcgttatgccgatatgaaagattttataatcaaaacagcgaagtggtacaatcgtcgtcttagaatgtatatatggaagagttggaagcgggtacgtacacgttttgccagcttgcagaagtgtggcatccctcgtcggaaatcttgggaatgggcgaatacccgtaaaggctattggcgcattgcggatagttggatattgcatagagcaatcacaacagataagcttgtaatggcgggttatccgtcaatgataattctttatacccaattgcatcgcagttaagagaaccgccgtatgccgaacggcacgtacggtggtgtgagaggtcggaaaacgaaagtaggaggaaaacttctacttcgttttcctcctactcgatttggctttcaatgaaggattagtattttatgctgtgcacattgattgcagccggctgtccgttgtatagtgcttcacaactaattgtcaggaatgtagacgagttcgcattattacagcgaatgatggctactccattttcgtcggtggtaactttagggttccaatagattgtacggcggtggtcattgccttgtcctttactgatatccgggtaatagggtgaataaaattcaatgggttgggagtaaccttggatctgtgtgtttcggataccacgtgattggtacttcttttccgggtcccaattgtcgatggtagtgatatagcaaattgcaaattgatttcccggttgattatagggagttgtgttgttcagataacttttgagagctttttcttcaaagggagagagtctggaagtttccatgtgattttttagactttcgtcgctcaggtgataagcgctgtcgtcatcaattccggcacttgctgtcgtgccgtcgcaaatcataacagattttatcgcatcgatatttttatctataaaaagctcccgatcaaatgttgagtaaagaactccatttatgacgcatagtatataatgattcttgtatttcatggttataaatggtggatctcccttccacttagacttcacttgaatattgggatttaatgtggtcattagccaagggaaatagtccatgaattttccttcatcgcgcattcgatccagttccttagggatatcataataagctcttacagattgctcgaaagctagaatttttttgtatttcgtacgtttggctttaatcgttacctgattcaacaaatgagtgtcgtgtcccataattgaatctagataaagagagtcggagagactgctccaccaactgagtccgctaatatcttcccatttaggatgtagctcttcgtaagcgtatttgcgtagttcgggtgtaaagttacggaaaagtgatatgtttgttttccggttcagcttttttcctttatggcgagtttgaatagccgcactcatggaaccattgaaggcatccattggaatgtggaagaatcccaaagagtctgtgaccgtagtacctgctgctgatatcgtatctctccgggcaatgacgcttacagagatatctttttgctctttgtttctcagaaaagatgttacctgcccatgcagagtcagtctcgtttccggcagatagattggtatttctggagtggcactgatggcttggcttatatcatattttctccatccgtgaatcatcaacagattatctaatgccactcttcgtctgggagaattgtttgcgaaataatatccaggttgatgaatgtatcctttcagatctgatgtaagtaaaaggtctgtgtaaattgtctgatcgaaccgttggaagtctgattttaaagcatcccggaccgctacggagaaatgtccttgtattggttgacctgtatggtctttcattgagatatgatactcaattggttcaaaaggatagtataatgcattggtggatgtggctgttaattgtaaagatggagaaggcattacatagcaaaagcgctcgcataacgttgccccattgctattcattaaagagagttgtatgactcctctcggcaatccctgagtggataacgggagatgatatactgtttgatctttaaaatcaatggtctgatacatgagcgaacgtccttgatgtgatatgaataaagccagtgtatctttgagacttgtcgaatttctgagaactttgatgactaatgctttttctttagacgccacatttagcacatatccatggggtaaagccttcggtagctgaaatgagtattttttatcttgataggtcactacagctttggcttgtttgtctgtaggggtgtatgtaaagcatcccataccgtcgtggagagttgtaaattgtgtaagttctacatcatctggcccataaacagttcctgaaatgcctactgtaccttcttctttacttgtcgcttcgaatgcaacgactgaaggcactccctctactaattgtccaccttccgggaagaatcgaatcatgaaatctttttcttttgaacgcggacgttgcttcatagattcatccattcggtaagtgatgatgctccggttttcgtctacttcgcttctccgttttctatatacagggatcgtacgcgagaaatattgcttttcactgaatgccaacatccacttcgtataggccctaatctcataaaaaccggagaataaggctttggtcagtatgaattgcccttctccttctccatcccgcaactgtatgatttgtcggtcgctagtatttcccagttggtctaatagttctacataaaggggggtactgattgggctaggctggttttgctcggccgttactacgtatgccttataccatatcgtgtctccgatgtagtaactggtgttgtccaagtgcagataggctttctcgcgtggatatgcatcggcgtaggcttgagaacgggcaaagtaagttgcgaatatagaatccgcaacttgctggctatggatttgcacggctatacttgataggaggcagaaagtgatgattatggagcgtattctcattacattttgaatgatcagtaacttgaaggttggggaacgtcaagtgttagcataactatacttgtttgatcactaactgttgcgaaatgaacagttgagccatcgtaatgactggagttggaataatttgtgcgataagcaaatgatacttcatctccttttgtatcataagaaaagtatccccattgaataggggagtctttattccaaggatcatagactgcagagaccgtaatgggttcccaataaccactgcctgtaatgagtacatcgcatgccatagggaaaggtatatcgggtggaaaacgaaaacaaatagaaccatacattgaattaactttagagaaagtgtactcttgcttatcaaaatcatatccgacgaagtttgcatagggattccatgggcctttatcaggatatggtcgatcatacactaactctgagcaggtagcacgaaccgcaatatatcctcctccttcgggaagttgtagatcggttacaggtatttggattgtttcataggttccttcttgaaccaaaacttcacggacaggaaagaaggaatattcaactggattaggatcaaaatcacgacttgctcctaattgaatctgatcatatttcccttgaccttgtcgtatctgaatatttagcaaaggtggaaatggaatatattgactccattctattttaataatctgaggtaattttgcatgctcaaaatactcgtcctggctcgttcttgttgttaccactttactggtcgcttctatactaacagggctgtcttccttcgtacaactgcaaaaaatgattgagaggaataatactaatagtaaatggattctttccttactacttgtgaattgattgtgtgtgttcataagctatatattttagaggcttaacaataactacttatgatctatgattatgcaagaaaggaaaaaataatgataatatgaaaattccgagtttaattagtgttaatctccagtctatatattacttaatccattttcaaggcaggtaggtgaaaagagatatattatgggagatattttaggattataattgtgttcatctaaagattttgctatttttgcaacctaattattctaatttatcacctttgctaactaaaaaactttcaatatggatacgagtaagattgttggagagaaaattaaagcgctccgggaagataaatcaataagtatagaggaattggcacagcgttcgggtttggctatcgagcagatcgaacgaattgaaaataacatcgatataccgtctcttgcaccgctgattaaaatagcgcgtgtgctgggggtacgtctgggcactttcctggatgatcaggatgaaatcgggcctgtggtatgccgtaaaaaagaggctaaagatgccatcagcttttccaataatgcgattcattcacgcaagcacatggaatatcattcattgtctaaatcgaaagcggatcgtcacatggagccgtttatcattgacgtgatgccgacagaggacagcgactttgtgctttcttcgcatgaaggagaagagtttatcatggttatggaaggggttatggaaatcagctatggtaagaatacctatttgctggaagaaggtgatagtatttactatgactccatcgttcctcatcatgtacatgcttacgaagggcaggctgctaaaatattggctgtagtctacactccgatttaataaaatctgataccaaatattaagaataatcgcatgcaattatttgaacgtactcttgggcaatggctggaacattgggctgaagagactcccgataaggaatatatcgtttattccgaccgtaatcttcgttttacatggagccagcttaaccagcgtgtggatgatatggcgaaaggactgatcgctgttggtgtggaacgtggtactcatgtcggtatttgggcggcgaacgtgcccgattggctgacattgctgtatgcttgtgccaagattggtgcggtatacgtcacggtgaatacgaattataagcaggccgagctgaagtatctctgccagaattccgatatgcatacactttgtatcgtcaatggtgaaaaggacagtgattttgtgcaaatgacgtatacgatgcttcctgaactgaaaacctgcgaacgcggtcatttgaagagtgaacgctttccgtatatgaagaatgtgatatacgtcggtcaggagaaacatcggggaatgtataatactgcggaaatcttgctgctggggaataatgtggaagatgaccgcctgactgaacttaaaagtaaagtggactgtcatgatgtggtaaatatgcaatatacatcaggaactaccggtttcccgaaaggagtgatgctgactcattataatattgccaacaacggttttctgaccggcgaacacatgaagtttacggcggatgacaaactctgttgttgtgtgccgctattccattgttttggagtggtgttggctacgatgaactgtctgactcatgggtgtacacaggtgatggtagagcggtttgatccgttggtcgtgttggcttccattcataaagaacgctgtacggctctttacggagtgcctacgatgtttattgccgagttgcatcatccgatgttcgacttgtttgatatgtcttgtctgcgtaccggtataatggcaggttcgttgtgtccggttgaactgatgaaacaggtagaagaaaagatgtacatgaaggttaccagtgtatacggactgactgaagccgctcccggtatgaccgctacccgcatcgatgattcgtttgatgtacgttgtaatacggtaggacgcgactttgaatttacagaagtcagagtgattgatcctgaaaccggcgaagaatgtccggtaggcgtacaaggcgaaatgtgcaatcgtggatataatacgatgaaagggtattataagaatccggaagctacggctgaagtgattgataaagataacttcctgcattcgggcgacttaggcattaaagatgaggacggaaattaccggatcacagggcgtatcaaggatatgattattcgtggtggtgaaaatatctatccacgtgaaatcgaagaattcctttataaacttgatggagtaaaggatgttcaggtagcagggattccctctaagaaatatggtgaagcggttggtgcttttatcatcttgcaggaaggggtggaaatgcatgagtcggacgttcgtgacttctgtaagaataagatttcccgttataagataccgaaatatgtcttttttgtgaaggagttcccgatgacaggcagtggtaaaattcagaaattcagactgaaagatcttggattgcagctttgtaaggagcagggaatagaaattatttaaataaagaattaaaaaagaagaatgaagaattagctgcgctgtatgctgcatagcaattcttcattcttctttttttagttcttcattcttaaatgaaatcgtctcccagttgcatctgggcatcattcacgtatttgcggatagaatgttcttcgtctttacggcagattagcaggacattgtccgattcggctatcagatagccttccaagccatcgatcacggcgagctttcctttggggagtacgatcatattatcttttccattatagatcaaagaatgactttttaaggtcacattgccttcccggtctctttctgataagtcgtagagtgatccccatgtgcccaggtcagaccagccaaaatcgcctaaagatacatatacattgtccgctttttccatgatgccgaagtcaatggatacattgggacatgcgggaaagttttcttcaatgaatgctttctctttatctgtagcatagatattttttcccggtgccagtttggatactaattcgggaagcaggatttctgcagctttaataatggtattgacgttccacataaataatccggagttccagtaaaattcaccgctttctacgaatactttggctaattccagttccggtttttcggtgaatgtctttactttgtagaagccatcaccggttggttcgtcaatttgtatatagccatatccggtctcaggacggttgggcttgatgcctagtgtcagtaacttttcagagtgagaaacgaattccagtcctttaatgattgcggcacggaattcttcttctttcaaaatcagatgatctgagggagcaacgacgatattcgcattcgggtttaaagcgcggatgtgataggcagcccatgcgatgcatggagcggtatttcttcttgcgggttccaataaaatctgtttctcatccaattcgggaagttgttccttcaccagatcggcgtacattgcattggtgacaataagaatattttcggttgggattaccttttgaaagcggtcgaaggtctgttgtaggagtgaacgaccggttccgaagaagtcaagaaattgtttgggcaatgttttgcggctaaacggccagaagcggctaccgataccaccacccataatcacgcaataattatccatgtttgtcatgatagtgactctatttttaaatgtttttgctaatgtacggtttattctctaaatacagaagcctttgggacatgttttattattttttgctccttttttttctcaaactattgtggaatcaaaatattgtcgtatctttgcaccgcaattgagaaatcaagcatgcccagatggcggaatcggtagacgcgctggtctcaaacaccagtggattcacttccatcccggttcgaccccgggtctgggtactgaagcggagaaagttgaaaaactctctccgtttttcttttctacccctcgtaactcgttggtttgctgatagattaaatcaagaactttgttataagaattggttcgatatgtttttccgtcaaattcgattttttcgggaaacatcgaacttatcagcttaatttttactcctacagacgcatttcttatatagctatctatattgtttatcagattgatagagtagtttagttttggttcgatattaccacggttagggttctcacgcatttcaatctgttgttgcatggctgaggcttcttttgtgtatctctccaacattctgttatattgttctttggttaagtctccgtccagatatttatcctcaatgctattgatacgtttttggacggtagaaagttcattttgcagtgctgctgcttcttttttgctttctcctttgcgttcgttttgcaaatcctttagaatttcgttatacaagtccaataccgttttattgggctttaattgggctgtatatcgagcgaactcttcgtttacgttctctgctctcattcttatatgtttttgattgttacaacaaaagtagtaggtgtatttgccgccattgcccgaacttgtagcaccagttaaggcacaaccacatacggggcagattaaaaacttccgcaaaaataagtcaggatttatggctttggatagtttaggtgttttctttcttttgccgtctaatatttcttgaactttgtagaatgtttcttcatctataattgcttcgtgttcaccgtttacataatattcgtgttctcctttgtatgctggcacacgaattttaccgatataaaatttgttacgtagcatttcaagaaatgaactttcgggtatattatatccttttcttgcaaacttcctacggatataacaaggtgtttcaatgcctttagccacttccttaaatatggcttgtataaatggtgctgtattggtatctatttctacatgggtttcatgtttgctaatacgtacattcttatatcctcttggtgctttattagcacatttcccttttgccaatgttccatgaataccgtccattgtggcttttgacctcttgatgttgtcgcattgtgccgagcctatgtgtactcccaataaaaggggccaagtgtcagaattgaagtctaaaggtgcttcgattgcatttggttcaactcccaatttgattaattcttttaggttttcactggcactgataatatctcgtgaatatctatcccaccgcaagaatagtaacttattcactttacctttgttcttacgtatatagttcattattccttgtataacaggacgtttctcaaatgttttagcactctcgtcctctctgtatgggatattatcaatgatgttatatcccatttggttacaatacttccgtaagcgttcttcttgtatgtctaagctggctcctaatgtttgttcatccgaacttactctacaatatattatcacatttgcattcataattcttgttttttagttaatgctattttttcattctctatctgcaattctgctaataggtatagatattgtctcactatttttactttctcattatcgtatttttctttacctttattgagtatcgctgcgcattgttccaatggtatcattagatactggtattattgtgttgcaatgtatgatgcaacttattcttacacattcaatcaatccacaagacaaggaagtgcctaggcatgaatgtgcttcttgccccatatatcattatttgaagtaaaagatatttttttaagtgaattgatgtaccaacattgcaaatatacgacctataaatacaattaccacttttgatgtgtaaattatgttaatttggttaatttacgcaaggtgttgatacttgttcccgtcagttttgaggtatttcggagtgaataccctcttttcaagagtctaatttcttctccatactcttccctcatagcctcatcgcttttcgtatatcccatttttcgccctaccttaccaccattattgaggaaattctgatagccgctcgctacacgttctcgaatggtcttgcgctccatacgtgctacttcggcaagtatagtgataagaaattggctcattggattgatttctccctctggagtaagtgtttcaatattataattttgaatgaatactgatactctgttttgattgagtatctctatggtttgtaaaacttgtagggtatcacgtccaagtctggatagttcggttattaatactttatttatattgtgtgagttgatatagcttatcatattcattagttctatgcgttctatgttcttttttgctccagatactttctccgcaaatatagcctcaactacccagttgtttgctgaggctaatgttctcaaatcatttatttgacgttcatagtcttgtgttccgttggtacttgatactcgtgcaaagattactacttttttcatggtgttacttgtttatgatgcaaagatagtgacgtatatttaatataaatcatttatagcgttaaataaggctagaaatatggtaaatattaaatatttatcattcctttgtggagtaaaatatacacaatatggataataaacaagaaagaacagttgttcacgttgaatacaacggacaacattactattttggctcactctctgcaatttatacgaaattcagtcctaaagacttgggtatcgcattggggacattaagaaattatggattgaaagaagaaaagccgtatcagaactctctatgcactataagaaaaggttttttgataacgatgcctaaaaagtaaagtaattattctacatctaataggtcttttagcctaactcctaaagcaagactaattttatatgcgttttttatcgtcagattggtgcgtccagcttcaattcgcgacatattagctttttcaaagttgcatttagctgccaagtcttgttgacttattcctttttcaagccttatttcctttattttgtctcctattttaataaaaagttgctgctcattcatttttctgtagttatcatttgtgataacaaagaaaagggcttatctttgcagactggttatcatatatgataactaacaaattcttaattaataaactcttataagatgaaaaagaatgtatttattttgtttgtagttcttttaactactagtgtgtttatgtcttgttccagtgatgatgacaatgacaatggaaaagttgaaaataccattattatcaatggtaaagagtaccttaatgatgagtctgcatctgtgtcgtacaactcttatagtcagtctattagttttgaggctggctttagtaatccagaaagtcttatggatataagttattttacgattgcaagtaatgatgctgctagtgtagataagctaaccaacggaatggaacttaatgctaaagttaaagaatttgtgaaaaatacagatttaggctctagctatacttatactacagtaggtggaaaagtcgttgtggataatgtgacctctgaaactataacgcttcgttatgatgattttaagttcacaaaaaatggtagtgaatatacgataaaaggtagagttctttatcacaaaaattaatcacaataatcttttagattaaactgacacaaaaaaaagtgtatcaataggtcttttgatagattatattgatacactttttgttttgatacataagcctcatcaaagtaacagattacgtatcttttcaatagggttttcgctagttgaggctgatgtcattgcatgataaaccgtttcaaactttttcattcgttttgttgctccgctgcgtgaactgaatttacttctaacatcctgctctagtagttttaagtcaccattgtacctttcgagaatgattttcattgcccaattttcgtaatcatcaaaagttgtgtttggcatattggctgtagaattaccgaaaaccttgtcaaattgagcaaggatagggtttgtatcggaatttagtacactgaatattttggtatcggtcaaattcagatacttcattatctttttaggcgtgtctaatgtaatttcaaatctggttttctctttgaaatagtctattactgattgtggttgtgataggctatttaaaaagtctttattgtggctggtacatatttctttttctttattatataaggtgattgtctccgtacaatctttggatttcacatctttagtaaacataattccctctttatcgtaatgtgcccacttgaagcgtctatagttgtttacttgcgaattaagagcgtccagaagattatcacttagaataaggtttgcatcataagttacatctactgatgtaattgccccatttgataagatactatctacgtcaatatcacaaatatttagttggtttatattggttagacattctttgatagtatctcttgaaattaagtctggatatttttctttcaaaatcttactggaaaattcaagagttaaggtttgttttatataactgacagctatataaaggttataaggtatatttatatcatctttagaactataaaatatacctattttctctccactacgtgaatgaaacatttcattaaacttcactttagtattgagaagatatttatagttggatttaattttaattctatcaaaagtgattaatcgtttcgtttcatattgcgatgtcattaaaaaattaaagttattcttttattcttgtgggaaatgtactctgtaggctacaatttccccctttgataatggagtatatcaaaggactatgaaaagagaggggattattgcccctctttttctgtcttgtcacttgagttgtcatctggtttgactggtatagtcttccagtaattactcatgccttgtgatattgcttggatatgcgaagctgacttgcttctacctcttaatgattgactgattttcgctttggtatcgtctccaagattacgatacattctttttcctatattatccatattaattgattttatactagataaatagtaaaatgaagtaagaatgtaaagaatagtaggttgatttcacagaaaaaatatctggaccagaaaatttagatacagagtcgtttgttcttattaaccatacctgctaaaatagggtattttaagagccgagttacggtgctatgtcttgtctattaatcacataagagataaaccttaattcacttacaaactaatatgttatttaccatacttgctttgtatcattaaatattttatctttgtggttgagaaatagttaatttgaaatgatgtaatccaaatataaaaggttggcttttataatggtatcagttcccgtagttcccaaattaaatccaaatcatgtaggaattggttcgagaacagaacggttaagggtaccacgaaaagctaagaattgagcaatcaattacttagcttttttgttatagggtatttctttctaatgtgcactaccagaaggttttcgatattttctatagactgtgttatttgcagcaaaaatactaaaaaggtgcaattcatcgtaaaagtgaattgcaccttttcttatctctcagcatcatttatcccttgcctacctttatccaggttgctttcttccatagccattctaatggaccctggcgatgtgaacgaagccaccagttacaaaaaagtattgtaaaaagaatacgcttacaccaataaggatacacgctgtaatgcctgtatgcagataaagtcctaatccccagttgtaaaacaagaaccctccgattaaagattgtgacaggtagttggtcaagctcatgcgtccataaggtgcaaatttatgaagaacattcttaagggttgtcaggtaataaaccagtatgatacctgcaaacatgattcctgtaaatgcaatatttgacagtgacttgcatagaaggacagaaggtacaagtagtgcttcgcgacttataaagtcggggagtatatttatcaaaccataaatggggaaaaaggcggtaacggctatgatgaatactttaatccagatttttatattcttttctgaatagagaaacgcgttgctacgcccaattatcatacctaccataaacagaccggcggtttgagtaactcttccgtgtaatagcatccaacccatgttggcaacattacccgtccatatggcagttttgcacatttcgaggaaagaaccttctttctgagctgtattgactaactcccagtatggagcatcaagatcagcattaataacatagtcggggttgataagtgcataaattatttgtcccaattcaataggttgaagtagaagaatgactgctatgatcgtgactgttcgggtagagagtcggcagactgcgatcagtacataaccaagcaaggcgtagagtaccaatatttcacccggaaataaagccgaattaatacaagctataaaaagaagtaatactaatcgccaggcaaaccgcccacgaaaatctttccctttaagtttttgtgaattgtcttgaataaaaaaactaaatccaaaaagcaatgcaaagatgcagtatgccttaccggaaaaggtgaaaaatacactatcccaaattaccctatccgtaaatatcagaaagttacaggtctcttccggaaagctattgaggctaaaccgttcgataaaatggataagtgtaattcccattacagcgaacccacgtagcacatcagctatttctatacgattattatggggcaatgtgttagataaatgcatgctttttagaatttaaaatgttaacgtactttttcagatgcaaatttaacgcagcccttttatagttttggaaaaatactgttcaataaagaacaaaatatgacttttgtgtgctttgtatgattgataatgctgtttgtcttttatagttagcctgttgataacttcctgaatattaatgtaaataatgaaataaaatgctatgttggtcttattaaatagaaacaacttgtactgaatacatttctaatgaaaggtatacatgctattgttttgtttaatttgtgaggggttagtccaaatttaattttgtagtgtgggttaataaagtataactgttcattgacgatttgataatcagtctgttttactactcttcgaaacatttctattgtacatcgggtgtatttgatagttaataactctttgactgtgctttcttgttcgctgaataattccaatatccgtttatacaacatacgaggtagtaaatgtataaatggcatatgagagataatcttacttcttgcaatttgctgatgtccgccgaatggcatttgccaggcaggaaaagcaatgaagatcattccgttaggcgatagatatttttttaagttgcgcagaaattgctccttgttgtcgatatgttctattacatcatgtatgagaataagcgggaaatgtttctgtagatcttttaataagaagatatcagaagcgatgaaagttcctttttgccttttagtgatgaagaagttttgtgcctgttcaattcgggatgcggcaatatcaattccaatgacatcacaacctagctcggcaaagggaagcagattccctccttcgccacaccctacttccaatactttgtttggcagatttccagtatattctttaatataaggaatataataatttctcgtagtctgagcttgttcctcaaaataacgttcacggtttgtatgtcgtttctgcatctgatttgtctattgtttctaactgttctatagttatgataaactatcagccggaagactgcatggagaatgaattttttaccaagagaaacgaatgcctacaggaacagagaacgtaaccggatgttcttttcggattgtgcgcaatgaacttccatcgggaatatagtaattaatggttggctctatatagatgctggtgtgaggtgtaaagtggtattgtacacctgtactcgcattgattgaccattgcaaaggtacatctaatgactggtaacccaaattaatggggacactatctgtgacatgagaagtatgcagagttccttttatcgggatttccatttgtaaaccggctgttgagtaaaatgagaattgtttataattcccaaaacggtaggaaatacggagaggaatacctatgtaatggagcttctgggttttctgaatccgatattcctttcctgtggtgaactctgattttaaataaatatattgtaatccggtttctatactccagtggttattcaactttttgttcaatgctagtccgatagtgatggggctattatggtgttgatgttctataattcttccactgttgttcttggcaattgtcattagcgtaagcgagtctcctaaggttccttcctgattgcgggtgtttaaatagtcataatattcttcccaagtattgacttgctgggggagaccgctttccaaaccgtcagagtgtggtgttgtcatcaacttgtataggttttgtgccagttgtggtccgactgaccctgccaacatcattttccatttccctattttctttttggggagtgaagtgaattcttggcttgaatatgagaatgtaataattttctctgcatgctcccatgtaaaagatggtttggcaacaggctgtttctctactgagtcttttatttcagaagtggtagataatcctgttgcacttgtgtctaatgctaatcgggggaggtttgctaaagtagtattaaaaggggggtcttctttgtagtgagagatatgtccggaagaggtaatgctctcattttcttctttcttatctaatttcactttccgaatgacattgttagaccaatgattatctttagtctcttttcttttccagtatagatagtcgtgtatcgttgggaaaaaaaataaaatcactagtataagaatcagcctgtaatcagaaatcatctttttaagtaagacttttgccctgaataattgagaagaggaggagtggggagctatattcaacagtttacctatttccttgtgagataatccctccaatacagctaacttgaagattttgctgtatccttctggcaatttctctaccatttctgttattttatcataaggaatagaatcagatgatagcgaattgtcaataggctcctcgttttcagggatatcagataagggaattgcagagtttgtactcttttggttgagataccttaatgaaatattcttcataattattcccatccagctttccagtttttcgggagtacgtaatgtcttaatcgaagtgaaaatgacaatgaatccgtcgtgtagaagatcttgtgcgatttgtttatcaggtatataatgaaggcatattctcatcatctttttcgaataggttttataaagtagacttaatgcctgctcattcccttttttacataaatctacaagttcttttatatccatgtgcgtgtattattttaatatgatgaatagaaaccgaaaagactgcatgctttttcggtttttaacatcttgttttttgcggatatgaagaaactttttgttgataaattgaacttgaatccataaaactttgacgaactttcaattattatgcaatctttgtgctctatacattttttatttcccgacaaactgctaactttatcatcattattataatgacatgtgaatagtcggttgtaccattatttaaatctcgtttatgggtaaatacaaatttatagaagaaagagtggaaacaatgtctttgtcggagcttaagatattcttgaatatactgaagagcagatctaaggaattgatgtcaactctggagtcagtaaggggaataaaagatttggaggctgtttgtaaatcaactcagaaactaaacaatcgtgtttctgagtttgacggaggatcttttcttatattagtggttggacccgtgaaatcaggaaaatctactttagtaaatctcatagcacatgctcacgtcagccccactcatttcttggagtgtacggtgcgtccgtctattatttcaaaaggacaggaggaatccattacccgtattttttctgttgctgataaagccagaaaggtagaacagtttgattcggtcattgatagcctgcgcggatttgaaaaactggaaaacatttccgagataagcattgaaaagaaagaattgaatgatgctaatctggaggagtgtgtttcgttagctttggaagaaagcgtgataaatacagatcatacgctggtgacatccataacaacttccggtggggagcttttgaaagataatatatttctggtggatatgcccggactggatggcgggtatgcgaatttggataatcctatttatgaaacgatctctcaaagggcagatttcgtgatatttgtgcaaagttcaaattctgctatatcgaaggtttccaatcgttttctgaagttgctgcaggagaataatccgaaagttccggtttgtcttctacataatgtgtttgaagcggcttactggcattcggaagaggagaagcaggctgtaattaaggcacaggtagaatttgccgagaatgaaatgggcagacgtaacttccagttgaaggagaatatatatagtttgaacttgggaaaagtggcggatgctgccagctatgagggaatggaggatcttcaggaagaagctgcgaaatttcagagatttgagaaggatttgtatggcaaggtgatctccaatagtactgatatacgtctgagaagcgtaatcggaagaacgctgaatcagttggaaaaactggataatttagttggagaatcaattgctcaacaggaaacaatcgatatagaatatcaggctgcagcaacttcgtttgacgagttactccgtcaggcgagtgaacttagttacgatgggagcgattttagaaaaatggtgcaagtctatatggatgatgatttgaaagagtttactgaaatcgttagggagtattatgattccggatgcaattccgcatttgccggtggagcgaaagggaaagatgcgacacgcagccttgttacaaagtttatgactgattcgtcagcggcgataaaaagtaaattccttgattcccatgaacatagtctggcccggcagtatttgcggaaactctctaacttgaaagatgatgcggcttttatagagaagatgaatacttttctgaagcagaaaggttgtgcaccttttgactcagtgccgcaagtgagggattttccggcggtcgattttgatttgcagggagcttttgatgtgaagaatattagtaatccgactgttccgcatatcggaatacccaatccgtttgggacttattcgacaatggaaattcagagttttctgaggaaagcgatggaatgtatcaccggaatcgatcatacgcataccgggaaaacgatcaaaggatatcttcagctgactgtcgggaagagtatatataaggcggctaatgacctttacgatcagtatgtgcctgtacgcaaacaaagtatcattgattttttggaacaacaaaaaacaatgtatctgaatgcgctggtgtctgataaagaagaatttgacaggaaggatgcgttgcttcggtcaataaatgcacaagttcagagttttaaggattcaataagataagaataagccaatgaaacgaaatttattaattatcacactcctgtttttgggctcttttgtgatattattgttgggtaacgtcattattataggtgagaaaatagcttccttgtcgcatgtcgcgtgggcagagtatgctttttacgccttgattctggttgtattttatgttgtcgttatacgtccggtcgttcgggtacatcgtgctccgcagattccggctttgtctattgatggggagtggaatactgcacaacttgttgcgtttggacataaactggcggataactgcaattatatacctaaagataagtcctgtcccgagttgagaaaactgcatcagcagagattgcgtgaagatttggaacgctatgcaacgagtaaggaagaactggtgcaaatcataagcgaagagttgaaattgcgcattgaagggggagaactgaaagaaacttcaggtccgcatatagaggatatgtattcggttcgtatcatcggtatcaatcgtcgtattatagaatgggcaaaatctgtctttatgattacggctatttcgcagaatggaaagctggatacggtatccgtgctttatatgaattataaaatgatagaggatgtgattatggcttccggcttccggcctacgaggcagcagttgttccggcagtatgtcaatatcctggttacttcattaatgacattcgttgcatccgaagtctttaaagatatgggttcggttgcccctttcggttcattagcagatcaatcttcggatgcagcgtccgatattgacatttccgatgcttctgttgacggagccgatgtagatttggatgacattggtgatactgtttcgggagataccggctttttgagtattctgtctaatgtgaaaattccgggtgtagtcatcggttcgatatgcgatggtatcgtgaattcgttgatgaccttgcgtatcggttatgtgacacgtaactatctgattgatggaatgaattcattaaatggaatcaaagctaaaagaaaagcaaagcgtgcagctgtgaaagaggctctgaagtctttgcccaaagttgtcgtggtaggtacttctttcgtgggaaagggggctatgaacattattctgaatattattggcgggaagaaagtgaaggaaactgataaaacttgattttctctttcaacctgtcaccgcctcctgaaactctttattcatcagtaatgtatgctggtgataggtcgcagaccatctgtcactgatctatcacctgtcaccgtctgcacacacatatatttattctctttttgctttaatccgtaccacccgatacacattacctcgtttggtatgcacagaaggcacccgattcttttgtaatattcttccgaactgaataatattgcaatcggatacgcgaatcttgctatcatgttgcacctgctccagaatttcgatggcaaggaattgttcgcattcttctccttctgtggctgcccggaaatactcatggaataattgttctgcaattggcatcacctggaactcctggttactttcattcatcaccttctcatcttccggatcaaaccaataccgttcccccttgtatagatcatgcatcgcttgtgcatagagctgttcgtaatcaattggggaacaatcgatcggtccggtcacatcgacaacaatataacggcggctaccggaagtgtccgtcagcaggtctttgtgattgctcgtcccaatgaaggaggcgtaacgacgcatctcttgcgtagccgtaccgtgtggacggcggacattgacaatcggtttctgaagaatatgtttcaaaaaagcctgttgattcactctgttctggtcaaattcgtccatattgatcagtgcgaaccgattgagggatatctcggcatcccgtttgttactgaaatcaatgcggtccgtgtaatatgcctgtaattcgggaggaagtaaactccggcaaaaagtagacttccggtaagcctgcggacctacgagcaatggtacagtgcagttcgcatatttccggtctgtctgccgccaatgtgccaccatattcagaaaccagcgatagaacaagtccgcccaatgtcggttgttgcagggaacccgggctgctatttcgcgaatccggtcgtgcccgtcccaacgtacatccagtccgaagagaaaatcttcgatcggattgaaaatcggaatccggtcggagtccagataacggaccacatccctgtcccaaaggctgagtccttccagccttgcgttcatggcgatactgtttcgaacacggctactcaggggacggaagtagaaacaaaacgtattccgttcccgatattccgttactgtcgtcatcgtattgtaacggaattcgtatctgcgttgcataaattcttccgttcgcagctctagttcctgttctgccgataggggagattttttgccgaagcctttggcgatggtgtatacactctgtactgtctggcggatcagaaactcttttttctgcctatataaatgagcgattgcccaacgggcggtttcttcttccggtatgcctgcctggaagcaattttcggctaactgaaccaataaaggcttcaagtcttcatcggatcggggatatatccccggctgaagttcgcttaaagattggcatgccttgtttaaagccacttcgaagagcgcagacaatgtttcaagactgtcatatccggggatcaatcgcttgaatggcgatgtttccgcctgtacggcttcttggtaggtcgtttccgagggcatttccattggctggcgcatatacataatggtggagtcgggattgtaataaagttccgggtcgtatgtttgccggcaaaattgctctaatgccggatttttcaattcaatggaataggagagtatcggctggtataagctgacagcttttctataggcatgcgcttgaaagatttccgcttcttcccggtttttgggaagtgatttgtccggtcgtgtgaaccgtacccatatttttacggaatgtccgctggaacccatgaaagcaagataagtctgcgaaagctcttccgcttcctgcttcacccggttcacttccatcaagtttgccagatgattgacttctatttgtatgattccgttgtatgcggtcatctgtatgccgttggccgttttgcgaaaagctgcagccgggatgacttttgccaatttcttggcgtcgtccagcttggcgtccggtgatgcgtaacgtatgcttgtccgtagattgctgatcggttgggctttcgtctcatgcttcatcgcttctatttgtaggtttatgtccaacgttcgcatggttggtgtccctccgttgtcccgcatcaaagtaagtttcataatgaatgtgtctgtaaaatgatctaattattgaatttgttattgttaatgtctttcttccggaaggcatgtaaaggtacgctttattattcggctttacaaatgtttgtgttgtacatttcttaaagttttttgtataccggttggttcgttgtctattatagatttgtgtgtagtctattaatagaaaagttcctttcttcctattgcaaagttcctttcctctaatagtaaagttgtttttgttcgcttacaaactataaacgcaagtttcaattatataaatgaaacctttgtttttataaatgaagcttgtgtttataaaaacagagcttacgtttgtagtttgcaataggcagaaaggaagttatctattagagtaaagtaagtttagttctaatagagtggaacttatctaccaatactctaggtgataagtattaatgttttggatgatacaagtggtgataggtgatagatgtggtgataggttcggataacctgtcatcttgtctgcaagtgcgatgaataactgtatgtggagtgacgggtgataggtgatagagaaaaatgagaaaataatctatctattgaagttagtggttatagcccgaaacttactctggtgctttttttgacgtgtatttcctgtgtcggatgactctccatcattccggactctatttgttgaattgcccttttggctttataagcgaactttcctttgggatattgtcgcagatatttctcataatcggttatggtctgacaattgaggaacatgcgttcttcatcttttcttttggctttttttgtgtcaggagcggggtaaactatttctactttaggctttggacgtgaccaagaaggatgctttactactatttcttcctttttaggttgttccggttctatagtatctacacttactggtgcgattactctattcttttttatttcttttttaatgctgtcttctaccagcatacaaattttctgttttacaaactctgcatgagatgaggcaggataacgattcaggaaatgtcggaaatcctctgttgtccggcaggcgttatatctgcgctcttcctcaatacttccgaagaatgcggaaactcctttgatcagcatgaataggaataatatgccaataataatccatcctgccatgcgtttgtttatagtggagagacgaattcttttttgtaaacgtgatggcgctggtgggagtggaggtgttgaagcatgtaccgctgatggtgagtgcggatgatttacttcttgccttagcatagagttagcatagttataagcttgctgagcagtgggacgatcccatgtgttaagcgagaggcatgcatgaagaaactggtccagttggggagaatagccgttatctaaggctgggatacgtgcaccattcagttggacacaaccacccataccttcccataaaatgtgaccggtcagcaattcgtaaatactcatgcctaaagaccatatgtcgctggtacctgcaataaatggtttctcagaaaagtgttccggtcccatataagcaagtgttccggaactttttactttgttagtgcttttacggaatgtatgctctaatttgcggctaatgccgaagtcggaaatgataaatttaccatcatcaccgattagaatattatcgggctttatatcttgatggatgattggcgggttttgactgtgcaagaacatgagtccacatgatacgtcgcgtatgaaatgccagatttgcttttcggacattttgccgatcaaggtagcggaggaaccattagaacagtaaggcattatcagaaacggacatctttcaaatacatcaaaatgattaagatgtaataagttgggatgatgtaatttataggcaagtttgaactcttcccgaaagtcttttatgccgttatcatccaacaggccataaaactttatggcaacttctacatctgccaatgtgtttcgggctaaccagacttctccgaagcttcctgtgcctaattttttctccagctgatagtgttcagcaaatatgtcaccactgttgaactgcatgtattttgtttgtcaatctggttgaggagagattgttgaggtatctgtttctgtaacaatgactgtatccgtcggaaaaatcttagctttccactttgcggatagctgtgggtttttataaagataacctcccagtaacagggctaagacaaaaagtaatagaactattttccggaatttatggttattcggtttgctgaatacagtgttgttcagattagctttgggctcgtccgtctctttctggataatatgacaaagtactatcgttacattgtcatatccgccgacagcaagagcggcttctatcagttggtctttacagaccaccaaatcattttgattttcctcgatgatttgcataatctcttcgtcgtggcacaaaccgcatagaccatcgctgcaaagcagaaaaatgtcatcgtcctttagattgtaagagcggaaatcgggattggaacgattggtcggatcacctaaacaacgagttatgacattgttgtaagggtggtcaaaagcattctccggatccagttttccttgatcgaccaagtcttgtacgtaggagtggtccttggatagacggcagaatcccgaattggcattgaaaacatagcagcgactatcaccgcaccaacaaatataggctttttcatttaatatccaggcaatgacaatagtagtacccatgccttgggtactactatcttctttacttgcattgacaatatttaaatcagcggctttgactgtcttggtcaagaattcttcaatagcttcttctgtgaccatctcatcttcgagtgttacgatgttttccagcttttctggcgtaaatgcgttttgtaccgtctcaatggcaatggcggatgcaacctctccggcgttagtaccacccattccgtcggctactaccagtaaagtgccatacttacctaaaggaatggtttcggaagattgaggaatgatccattccgattggcttaaatcccggtttactacaaagttgtcttcgttgtttttcctgactaaaccaacatcagtgcctgccgctaatttaatttttatctcagacataatttttattttatatttcctattggaactaaacggtctttgccctctatactacctaccatgaagccgattacctgatatgttccattttccagaaggaatgctggagaaccataatatccaggttccgccacgcggttttgtaatacgatagttcggtattttgtatcagaaatattagtgtggtcgttgaagtgtgccggagttagattatgaatgtcagcataacctgcatagcctaccatctgtatttcagttcctccattcatgttgtttgctgctgttgtatcaaaaggaagaccttcgccgaaagtacctttacctctaatatatgcccagctataggcagcaggagtcactatactgacttgtacatagtttctacgtttataagctagctttataccatgctctcttagttgtaccctgattgacttttccacctctatttcagtaaatgtggtgtcatataattggtttctgctaaagtctgcatttgtgaatgttaaaggttttcctgttcccttggtgctataagcacgataatgtaatattatgttacatccggctcctctgtatatggccagtagtctacgccatgaatctttccattcggtattagagaaaatccatggctcaacgttttgtctgtctgtaacaaatgttccgtcagatagcataaaaccggttccgcaaataatatctgatacttgtatgcccggatcgaattttgtgccattatattcgatttcaatatggtcaactttgattgtatagatatgatcgtaataatctttcagatctcccgaagcattatgatcttgttcttctaccacatcggactctacattatcttgatgagtcctcgcctgttgagttgtctgtggcttataactggcttcttctacttcttctgttgcattttcggcagctatggtacttgaaagattgtccaaatcagattttactttatagaaactggcatttacattgcctaattgattatttacattagctagctgtgactttaatgcttctgtatttccatcgctagttcgtaatttagcttctagttcccgttgttgtgtttctaaagccgcacgttcagttcctagtgaatccaactggttctgataccctcttagttgaacttcttgttgttctgttttctgagccagtaagtcattttttacccccaaactataattccatgcagccagaccggcaacagccaatacgaaaacaatccccataatagttaatgccgttttgtaggggcgtaaggcttgcttacggaaaagactcattctttctgtcaaaccgatactggaagttaacgcttggcgcccttgtggaactataaatcccaagcgtggtcctcctacagataattgtatctcatctccggtttgtaaatagtaagaaccattaatcggatgtccgtttactaatgtcggattggagtgtgagagatgaattagtttccaattttcaccatcacgtacaattgcagcgtgtttgcggctcactgtttcgaaactttcatcaaagcgtacttggcaggaggcatctctacccagctctacttgatcgacaatgattttttgagattcgcctgcctgatgatactttgatggagtcttatgctccagaatgaagtaagttctgcctgaggcacccatcaatgctcccataccggcacctactgagccggctagggtacgtttgtaattttgtgtatccatactacttaatatatagttaatagttttcaaatctcatttttacgtctccaatagatatgatatcgccaacctttagcctgtaaccttgttgggtgacttgtgcagaattgacataagtgccgttgctggactcctgccatactttttgctctttttgccattgtccgtcccgaataatccaatggtcaccggaaggtgtcgtttccagtgtacaatgatggcgtgatacataagtactttgccgctctgttacaggcagcagattatcaggctctctgccgatagtaagtattctgcaaccatgtgtggcaaattcgcttagttgataaagctttccatattcttcgccatgcatgatacgcatgcaaaaaccttggacagtttgtggtgggcaatatcccctttccatagggacctgttgggtctccggcagatatttcaaaacttccttgacggattgaaagcggtttttaaaatcgggattcagacaccctgaaaaaagtcgatcccattctttcccgttttttatctgtactaacttccggcggttccagtctccatcttttcctcgtttttggtatagagccaattcattatgactggttaattcaccaaagggcaggctaccggtcaaaagttggaaggccaatactccaaaagaaaaaatatctgtagtaggtaaaactgtggcttcacctcgcatacggttcacttgttcggggggcatataggcataagttccgaatatttgattgggcttgccgaaaatgttacgttccgtcatacgtttatttctatcgcccgctataccgaagtctgtcagtgcagctactccattgctcttaaaaagaacattctccggttttaagtcacggtggacttttcctctgatgtgtaaagaatgtaggccaagaaggatttgttggcaaatcaaagggattttactgttttgagagcctaaatagggtgtcagatctcctcccgggcaatactccatgacgatatagggattgcctccaaccgtaccatagtctatagaactcaccaagtattcacagtctatctgccctgttttgaattccatttcgaaacgatctgtcaatggtttccgtatttcgggtggaacctcccaaagtcttaatagtttcagcgcatagtccttacctgcgttgtccgtaactcggtatactttaccgaaagaaccttcgcctaatgttttggaaacccgataacggttatcgatgtattctcctacattataatcacatctatcgacagattggttggtcacaataaatcactttcaaatttaaatcttcggtcacctaatacgataatatcatcaggtatgatctctatttttctgtttgcctgaataaaggttgttcttagttcactccggtcgagcagataccaatgcccatcttcgaaaactatttctgcttgttcctttgaggtgatagtccggttggatacttctgtattttcccggttcaaaatgatcgattttccttcatattccattttttctgaaggaatgttctcattctcttccggaatgatggttaaagaacaatgaggtgtaatatcttccggttctgtttctgctatattttttatctgtcgtcggatagtgggacgatgtacacggacaccacaatgcgggcaaaatgagcaggtaatatctatctcttttccgcattcctgacaattcattttatcttccggcaagaaagatgttttttcttccatttttttatgttcgtcgtctgcggaattatcggctctttccagaggtgtcccacagcaagggcagcttgtaaattcacctactatcggataactgcagttcgggcattctgtagcaggctgtgtgatagcagaatgggtatcgggctcattcaaagtggggaatacaacagtttttctgcacttttctctattaggatttgcatttagcactgtgggtttggggatggcttctccataaccttctcttgacacaaaatcattttgattgttggcgtaaccagtcgaaatactcaatagttgtccacattttagacagaccgttgtatcagatagattgtcccaaccacaattcatacatctcataagaacttattttaattgttgaaccacttaaagtataaataagtcgacgcctaagatgacgattcatgtatagtcatctctaatcatcttaaaatatacctccttttttctgtgagaggatggcggaagaaatttctcctcctttcgtctttagtatcaaagttccttctttggcttttttggttttaccaacttttagaatcagtttgtcactgtcctttgctatgacttcgcaccaacttggaatatttattacttcccattctgtattcgtctttattggtaattctttaatttcgcctttggaaccgaactccaatttgtccaatgctatattgatgaattctttttgaccactttgaacgaccttgactgtttcttccattttcccgttgctaatggtaacagtggctttacgttcagaagtcagttggtttatttcacaacttacagataagttttttccatgaggaatcactttacaccagtttgaatctgaagttgccgtccattcttccggagcactatctactttgatgtattcggcttttgtcgtctcgtagccaaatcttacagaatctggggtaatggcaagtctggtaacttcgatgacaggggcaggagtggacttgggagccggtttgagtttctcctcgcattccttaatcttacttttgcaatcctgctccagtttgctgtcgcatttcattgctgctttaaaggacttgatagcttccctgtatcttccttttttcatgcttgtctccccttttttgtaaatggcggcacactgcccccatgtacttattggcatagcaagagcgaagactagaattagtaacttaatgcatttcttcattgttattgttgtctatgtttatatatggttctattttctttgcacgattttcgaaagcctcagctgcttctatttgctcaaacattctcatggtatctgcctttcctgtgaacatatggtatgcagaatctaatataatttccacttgctttatttgattttctgcaagatccatgtatccttccttagaaataaaaactgaatctttataaagatttacctcacgatacttcttgatagcatttatatagaaatcttcaaaaacggagtcgttattttgtcttaaagtatcaatagtatatcggaaaatgttacctagacttttgtaattatcgccttctagaatgattgccgagcatatgctatcgttagcattggtttttgaagctatttcttgttttggctttggtgtaggctctttcccacttgttgccagatagatggtaacaatggttgcacatataattataatagccgcaataataatgagtttgcgatgctctcttttaaacagcgtagaaactctcttttttatatcggatgattgcataacaggaaattctgcatcagaatgaatggatgagggctcatgattatcctttaattcaaatgaaagattttcttgcccttctggagtttgaatttcatttatctcatcttttgatgaaagatcagaggtcgtttgttgtgaactttgtatattgagaggcaccgagttaccattgatatgctggaaggcataatcagcgatttgtctggcagtaggtctgtcccatgtgtttagagcaagacatttataaacgatctccttaagctcttgtgaatactcctcattattgataagtggaatatcggcaccgtttttctgcaacagacctccatgatcaccataaggaggtaaccccgttagcagttcgtacattgtcgcccctaatgaccagatgtcacttgccataataggggtaggggatggaccgaaacgttcgggtcccatgtaagctaatgtgcctccactaagttcttgcccttgatttctacgtaatgtgcttctaattcgtgtactgatcccgaaatcggttatcatatacccgttttcatcattaattaaaatattatccggttttatatcttgatgaataacaggaggaagctttgcatgaagataggctagtccttcggcaacatcatgaagtagatgccaactttcggtttctgtgattcgattattgtcagtgaggtatttgaatatagacccgtttttgcagaagggcagaatcagatatggcattcgctcccaacaatcatagtaagtaggatgtaataaattggtatgattaatatcaaatactaaagaaaattcttgtgtaaagagagaaatcccggcatcgtcaagccccatacccggcgcatatattttaatggctactttaacatctgtgagtttatccagtgctaaccaaacttctgaaaaaccacctcttcctaattgtttgagtagttcgtatctatctgctataacttgtcctgtgtctaacataaagcttatagattaaatggaaagatatcttttcttacagaggtagtctctccatgcataatttattagtttgtcttaattagtgctttttattaagtatgtgagattgtcggtattagataatcacataacaatatatgcaaagtaataaataaaaaagtgaataaaaaaatggtgaaaaataggcgttgaactaaaatgcgataatacgatctatactgcaaaatataatgctatgctgtatatttttgttttatgttttgctgactgaaacctaaaatgctgtttatattgtgttctaaaactgtattaagtttgaaatatataagtgatttctaccaatatctagatgtgaaagtggtaatctgtccgagagtatctgaaatcatatcttatgttatatattaatataatttattgcccgtttaagcacgaatttcattcaattagtcgttcgaaacgaccggataatcatatttctcggttattgtgttttttttattttgtccggtttcttatctttgctaatagtaattaatctatatacacattcaaaacatgaaaaaatatcgtatttttctatgtctgtttatcatactgtgtagttgtaacgaacaatataatgaagactacatctcatttggaagctactcttcaattatgttctaagatatttataataaaattaactcataacaatatttgtatatgaaacagcaaatactaatatctattactctcataaaagatgaaattgctctttatgaatggatatttagtatagtccctatgcgttttcttatataaatcgaatacaattacattaaaacggtatgattggggactacatacacaaacaatgaacatatgaaacgaaattatttgctaacattcattcttgcgcttgttatagcaagttgcggaggtagtgatgacgatgaagcggaaacattattgactgtgtctcctaatacgtttacactttcttcggacggagattcacaagtactgaaaatccaaagtaatacctcatggcttataaccggagcttcaggatggttgtctctatccagttcatcgggcaaaggaaatgcttctgtggtattaacagcacaagagagtaaagatatagatgaacgtaaatgtacacttatagtgcaaagcgaaggaggcgaaatttctgaacctgtatccgtagtgcagcaaggagtttctgtatctctatctgttgatgtgaaagaaattaatcttgcagaagcaggaaaagaacaaacattcaatatcacatgtaatacttcttggagtattagtggagtgcctgaatggctgactgtatcttcaacaaatggtgtaggaaatgctgctattaaagtatcagcaaacagttttaataactcacctgctgatcgggatgttacacttaatatatcctcgtcaggtggctcttctcaatcagtgaaaattattcagaaagccggcttggcagcaggaagtaatgtgacagcccaaacggttgttgtgttgagcgattgttttgctacagactttgagtatggtagtaatgtaacatatttctatgctgtggtgtttgaagcttcattcattgaaagatatacagatgaagaaataatagatgttatgaagacagatgaaaaccgctgtacacctaatgataattatgtaatttcgttctatggtctggagcctcaaaccaaacacgttttgttcctcttaggatttaataaggacggtgaacgaggggaacttataaggaaagaaatcacgacgaagtctggaactaaccagccagaggcgtatgtaagcaatgttacatatacaactagtgaatggtcttggtatacaactatcggtgcgtatgccactaaatattatcaatggattttagaatactcttcaaattactataactcttcagacggtttagttgcttggtatttctctaaaaatataaaagaaagacctaatgctgactttgatccaattttacaatcggggggatggactcgtgctagaacatctagtataacaaaacttcaaactgttacatggggagttggacagagcggagaattaggtggtactattaataactatcattgggaacctaaggccaatggcgtaatgagaataaacgaaagtaataggaatacagcaaaaggcattgctcatatcggtatgattgtaaatgaaaacaccttgtttaaaggagcaactattactcgtattcgttaattaataaataatgttttcaggaacaagccttataagattaaggcttgttcctctttattttagatctaataattatgaaaacggttatatacttacaaactctgattgttattctatcgtttttattccattcgtgtagtagtgaagaagttgataaatgcgataaagaaataataacctttcttcctgctgttagtgtatccacgcgttcgactatggaacgaggatttgaagaaggagataaaattggaattttcctatttgatcagaacaaagctgcaaagtggaaatatggtagcgaatgttgggtaagtaatattcccgttgaatataatggaagtgttggctgggattctgagatgcaactgtattggcaaaaagtcccctatacacttatggggataggatattatccctatgctagcagtacgttagataaagacttcacaaacgtttactttcagcttccgaatgatcaaagtaatcggaaattattaagacaaagtgatttcttatgggcttctactacagatattatttatgagaagtataatggagggattcctttattattcaatcacttgttcagtaaattaactgtttcattcataaatactacttctatcacaaacagtgatatgaagaatggggtacaagtgaccaatgtctataatagagctatcgttaatctagttaccggagaagtgagctatgagtcaagtatatcaccacaggttattcaaatgtattatgacgaaaataggcaaacagctgaggctataatcattccgcaaagcgttccggtcggacagtggattaatttcaaatataaaggtcgtttttaccattatcaattgcaagagcctcttatattagaaagtggaaaggagtataagataacaatagatttatcaactgtccaataaaatgaatgatatatgaaacgcattgctttatctggcttacgtaccttagtaatgctgcttgttctggcagcttgttctacagaacacgaagaagaaagaatatactttgaaatcagtcaatctatatctaatggatttcagtcaactgatggaaaaccacaagattcaagtatttcttttaatacaggagatattatcggagtatttttaacagaacaaggtagtcagctctctcctgacagctatttatataatcaagcttgtatttttgacggcaatcaatggtcactcggtaagcggttttcatttcctgctgagaataaaggtcagaaaatgaggatggtagcttattatccatttatacagccattagaaaacgctgttctgccatttgaagttgcaactctgcaaaataatgcgaataaacagaaagaaagcgatttgttatttgccgaacaggaatacattatatctgaagcagcggttgatattcatttttctcacttaatgtcacaagttacatttcaagtggattatgccaatgggatatcagatgtttgttccaatatatatctgaaagcgtgcaaccaatgttcattaaatttggaaaatggtgcggtaagtactcatggaaccgtaacgagtattgaagctatgaaattaaaagaggaaacctctgataacagttcaaggcgattttcacttttaattccgcctcagcatctttctgatgaacaagccatagaattgaaggttaatgagagtcctttttttataaaactagaccaaacttttgattctagagtacattatattatgcatcttactgttttgggagacaggcaggttacattgaatggcgttagtgtagctagctgggaaagcgtcaatgtgacacaaggcagcctttattctcctgaaacctattcgacaggagatgttattgtatatcaaaaaatgagggaaaaccatccggtaactctggttgtaacaggtgatggatttaccaccaatgaattagcgcctaatggcttgtttgaaagtagtgcacgtgaagctttaaactgtttattctctgtagagccatataaatcatatcgtgaatatttcaatgtttatatccttcctactgtttcagaagaaactggtgcgggaaatacggatacgggaaaaatgagaaacacctattttaaaacaagttggggaaacaattactcggacatgcaagtaaaagattataatgagattttcgatttcgtgagttctacctgtccggatatcatagagaataaaacgtctattgataaagttcctgtttttcttttagttaatgattcacgctatggaggtatatgttggatatggaataacggattaagttacgctattattccgctgacagaagggaatcttcaatggtctggaaattctagtattggtataagtactggtgactggaaaaatatttttgtacatgaaggcggaggacatggctttggtaaactattagatgaatatcattataacgatagcccaaactatacagctgagtcaatagaaagccaggcatgggaggttccccttggtctgaaccttacgacagattttaataatactaagggtagcgtctattggaagcacttgctgaatgattcccggtatccccgcacaggctttttcgaaggagggatgggctataagagtggtatctggcactctgaaattataagttgtatggatgataaccgtctatatttcaatacaatatcgcgtcagctgattgtagagagaattaaaacaatagctggtaagccatttgtaatagaagagttctttgcaaaggatataaattatgatccgttgcgagattttaattcgtttaaaacttcggatcaatatggtataagagaaaaagccaggcaggtgcctcgtacaccgcatcctcacttgatgaaatagtaactggatataatattatgggaatatccaccagaagaaaacacagaagatatgaataagtataaagtagttatagttgatgacgatgaagtggctattgggaagttgagtgatgcattgaaaaagaatccacgcttctctatagaaggaactgcgcgaaatgataagcagggaaagaaacttatagttaagatacaaccggatttgttgtttttggatgtggaaatgtcggatacagcaggtttagatttgttgcatggtctgcgcgacagtatttcatggaatatacgggtggttttctatacggcttatgaaaagtatatgatacatgctattagagaatcggtgttcgattatttgttgaaaccattcaaggaacaggaactggagtacattcttacacgctttataacacaagtagaagcggaacaaaaaaggtcattgccaataggagcatctttgtatatggggcaaacattcatagtgtttacaccgactaatgatatgcgtgccttgcatccggctgaggttgtgttttttcgttattgtgccgaacgcaagcaatgggaggtgatacttagcactcaattgccagtggtgttacggcgtggaatgactgctgaacagataatcaaatattcgccttgttttgttcagatacatcaatcatatattattaatatcgattatttgatgattataaaggataataaatgtatgctttatccgccttttgataacgtgacagagttatttgtttcaaggaaatataaaaaagagttgcaagacagattctgcttgtgaaagtagaatggcggaattgaatgctaattcataaattttatccaaaagaaggaaaaagaataaaataaacaagaactaaagttacatcctatccataaaaatgctatatttattgcagctagagagcactttaagtaatgcttaagacagaaaacgaaaagtagtatatatgctatatattttctattattaattacttaaacacattttttatggaagccaagaaatcaaaaaaggctgcaattgagaatcaaagaggttcttggttgttgatgggtttggttgttgcgcttgctttcatgttcgtatcgttcgaatggacacagcatgatgtaagagttgcggcagtatcatctgatgatgaatccatctttgtaacggagctcgttccaatcacattccctgaagagaaactggaaccgccccctccaccggaaatcaagcaatccgaatggatcgaaatagtagatgataccgaagaggtgacggataacgtttcagtagtgccggacaatgtgaatgaaccttacaaggttgtttgggtaccgccagtagtggaaactaaagaagttgaggaagatgttattcacgtaagtgtagaaatcatgcctgaatttcctggtggttcagctgaattgctgaaatatttgagtactcatatcaaatatccgacaatgtctcaggagatgggctcacaaggacgcgtaattgttcagtttgttgtagacaaagacggatcgattactaatccgacagttgtacgaggggtagatgcttacctggataaagaagctatccgtgtgataagtggaatgcctaagtggaagcccggagtgcagaacggtaagaaagttcgagtaaaatatactgtacctgtagtattcagactgcagtagttacttgaaataaatgattaaaagggtcggtccaccgcgggagccggcccttttttcaataaaataatatatctttgcgtcacgaacaaaaaaaatgaaagactggtttatgaatcttctgtattacctaaaaagacctttaatctggctctcccgtttccgctaccgttgcggatatggtgtgcactctccttttgctttcagtctgatcacggacgtgatttatgagaagatgccttattatgcatacgacctgctgaaggcggaacagaaaaagcggatcacaacacagggatgggagaaaggaataccaaggatcaaccgtctgttgttccgcctggtgaataaagtgcaaccggccactatcatagaagtaggccagccctcggcagcctctttatatttacagtcagccaaaccttctgccgggtatctttttgcttctgacttatcagagctctttctggatgccgatactccggtagactttctgtatctgaatgactatcggaatccggctttgctggaagaagtttttaacatctgttcccgtcggactactccgaatagtttgtttgtcgttcatgggatctgctattcaaaggcaatgaaaaatctttggaaacagttacagaatgatgagcgggtgggaatcacttttgacttgtatgatgcaggcttgcttttttttgatacaacaaagattaaacagcattatatcgtcaacttctgattacctttatacgttaatcttatatatagtaatgatgaaaaatagacgtttatgaaaaaaagccttgtatatacaaagaccggtgacaaaggaactaccagtcttgttggcggaagccgcgttccgaagacccatattcgtttggaagcatacggaacaattgacgaacttaattcccatctgggatggctgaatacgtatttgctggatgaggcagaccgggattttatcctgagtatacagcataagctattctctatcggttcacatctggcaactgaccaggaaaaaacacaactgaaagccgccagtatccttactccggaagatgtggaacgcatcgagcgcgagattgataagctggatgaacaactgcccgaactttgtgcctttatcatacccggaggtagccgtggagcggctgtttgtcatgtgtgccgtacgatttgtcgaagagccgaacgtcgcattctgactctgtccgaaacttgtacaatttctcccgaagtgttagcttttgtcaacagattatcagattatttgtttgttttatcccgaaaaattaattttgatgaacaaaatagtgaaatattctgggataatagttggaaatgatagattttattatacttttgccgaaaaatagaaaataagtattcactttttaatactcaagattatgtattggacattggaattagcatcgaaactggaagatgctccctggccggcgaccaaggacgaattgattgattacgctatgcgttcgggtgctcctcttgaagtgatagagaatctgcaagagatggaagatgaaggcgaaatctatgagagtatcgaagatatttggccggattatcctagtaaagaagatttcttttttaacgaggaagagtattgatttagaaaaagaaaccgaacatataaaaatacccgatagctgtgtgaaagctatcgggtattttttagttcgcccagcacgaacatattctaacgggtgtaagtccctaaagcgccctgacaacgggaagtatatagccaacggcaagggtgtccatcgtgaggtggaatctgaaggaagcctgcggcaaatatctggtctgacgtacagaaacttgatattaaggcttaaggatgtggataagtttgctaaacaaaacgaagtcctatagttgtccggaacatccaaagtaaatcaagcagacataagatggaaagaatatgtccataactggggaggtctcacgggcgaggaaaaataaataaatacagtcaagcagtaataacgaaccgtgagaagtcagcagaggtcatagtaaccgacaaggtaaaaaaatcggcagtcggtgaaggactgaacttttaatcaaacaagtaccatttaatactttatgaaagagtcaatgcggaaaatcagtaaaacgaactgcccacaaatggataggacagcatccgacgagtatgtgggagtgcagacttttatggagataaaagatgagcagcttgtggaagtgcaattggaagaaaacaatctgttggaactccttctaagtccatcgaacttgaatgcggcataccgccaagtcgtaaggaatggaggagtgggaggtgtcgataagatggagacgagcgaactgttgccataccttaccctccataaagacgaattgttggaaaagatacgcagggggaagtatcgtccgtcccctgtgcgcaggttagaaattccgaaagacaacggtaaaactcgcccattaggtatcccgacagtggtagaccgctttgttcagcaggcaatcagccaagtgttgataccgctttacgaacctcagttcagtgacaacagcttcggcttccgccctcatcgtagtgctcacgatgcactgcataaggtgcaggaatatgcagaccaaggttatcgctactgtatcggtttggatttggaaaagttctttgaccgtgttaaccacagcaaactgatagaggtcttatcccgaaccgtcaaggacggcagtgtaatatctttgatacacaaataccttaatgcaggagttgtagtatctcacaaatacgcggagactgccgagggcgtcccccaaggtggtccattgagtcctatattgagcaatattcttcttaatgagttggaccaggaattggaacgcagggggcacccgtttgtccgctatgccgatgattgtctgatccttgtccatagtcttcgggcaacggagcgagtccgtgatagtatttccgagtttatagaaaagaagttattcttgaaagtaaacaaagagaagacagaagtcggttccatctgcggcaagaagtatcttggacactccttctactgaagagccgaccgtaaatgtggtcttaatcttcataagaaaagtcaatccaagttcaaacgcaccatcaagcacctgaccagccgtagtagtggtcaaggctacgcttggctgaaactccacctgacgcaatacatccgaggttggctgacatactatcgttatgccgatatgaaagattttataatcaaaacagcgaagtggtacaatcgtcgtcttagaatgtatatatggaagagttggaagcgggtacgtacacgttttgccagcttgcagaagtgtggcatccctcgtcggaaatcttgggaatgggcgaatacccgtaaaggctattggcgcattgcggatagttggatattgcatagagcaatcacaacagataagcttgtaatggcgggttatccgtcaatgataattctttatacccaattgcatcgcagttaagagaaccgccgtatgccgaacggcacgtacggtggtgtgagaggtcggaaaacgaaagtaggaggaaaacttctacttcgttttcctcctactcgatttctcatacaatattaaaagaccggcatctgccagatgaatcctaccgaaatccggttggtactgtaattctcttgtcccagcactttggcacgggaggtgaagtcataagaacgtcctacataggtcacgaagaaatgcaggttggtttccatcggataaaattcgatacctgccagatacccccaggaggtacggtagttacctttttctatcccttcggaggctttggttacggaagccgtttcatacattcctttcacgaaggcattccatttcgggaggaaacggtagttacacttggctactacggataaataacctgtatcaaacgcattgtgtccgcccgggcgaccgacgatgccggtgataatccctttacggtcaatctcttcttttgagtacatgaagtcgacaaaggcgttccactttccgagattcagttcatttcctacagcatagtaatacatattatgatctttggcttcgttcatcacagaggccgaccagcgggttttaaatacattattaaaattgccaatccagtttaaggtatagaccagcggcatttttccggatttcagatcggggagattaccctccgcatcctctgtgattccgtaagtgttgtcgaaagagctattgcggctgttcaatatctgcagattaagttgctgatcgggagtaatgttataacttgcattcagaccggtcaggaagttactcatataatcgatcatatcacaatattgatagacatcgatcgggttgaggtcaaactcgaagccgccatagttggcactttgtttaccggcaaacaggttgaacttatcgttgagcttgataccgatgcctgcccagtcgatggaggtcgggagattgtctatcatattgtttccgtcgttcgagcggttgagacgctggcggtaacgataagaaagccagttgttgatatttcctttcgcttcgatgcggagctggtgcatattgaagtcaccttcctgaaatccattttggaaatgagcgtcaaaacttccttgcatattcaggtataagttgaacttatccgttttcttttttacgtctgtcagttcctcgaaaagaggagtgtttggggagaacttttgggcatacattgcctgtatgctacccgcaaggagtagcataaacattaattttttcataagtaggtccggtttttagtattcgttaaagtattcctgaatttgtttccagtccgtggttttggtcagcgcaagcatcaatagtacacgtgacttttgtggattcaattcttgagaggctacaaactgatacttggcgtcatccacttccgcatcaagagtggtaggaccagtcggtacgcgggaagaacgaacgactacaatgccttttctgcgggcgtctatcaatgacggaaatatgtttttatggatattaccgtttccgactcctgcatgaatgattcctttatatccgttgttgagcaacggagtcatcatatcggcttcaatattggaatagctgtatacgatgccgactttgggcaatgaagtcagtttggtgacatcaaatacggattgggtggtatgtttcttcagtgtgatctgattataacatactttaccgttcagtacatatcccaatgcgccggagttgggagcctggaaagtctgtacatcgaccgtgttcattttaactacgctttctgcacctagaatcagaccgttcatggcaaccagtacacctttgtcttttgattctttagctgcagcggtaactactgcattataaagattcagcggaccgtcggcacttaatgctgtagaggggcgcatggcacctaccaatacaacaggcttgtcacttttgacagtcagattcagaaagtaagcagtttcttccatcgtatccgttccatgagtgatcacgattccgtcgatatccggtcgtttcaataactcgttgattttcttggcaagtgtcagccagacttcgtcattcatgtcctgtgaaccgattctcacaatctgttcgccggttacattggcgatatctttgatttcggggactgcatccagcaatgcaccgatagcaacttgtcctgccgtatagctggtgcccgtagccgagcttcctgttccggcaatggttcctccggtagcaaggatgtggatattcggttttgcggcaaatgccattgttgcggataatagtagtgttactactaccaggcctaatttcttaatttgtttcataactgaaatgagtttaggttaataatatattagaatatttgaataaagagcagtcctaaaacaatagcgactacggtagataccagtccgggcatcataaacgaatgattcaacacatatttaccgatttttgttgtcccggtgcggtcgaaattaatggcggctacgacagtcgggtaattcgggataaagaaatatccgttcactgcggggaataaggcaatcagcatatacggagaaatacctaacgcgatgcccagcggcatcaatgcccgcaccgtggccgcctggctatacaacaggatagacatgacgaacagcgcaataccgaacagccatggcatctgccgcacgattccttcgatggaaagagtgagctgtgccatattgccctgaaggaaagtatcacccatccacgcaataccgaagatggcgataacagcctgcatcccggcagggaatacagaaccctgcgttgctttgattccatccgtcttggttactataaggatgatagcggctgccgacaacattacgatctcgataatggaggacataccgagcgtgacgatttctccatcgatgaggaaactgggacgcataccttcaaaagatccgaaaaggacgataaaagcagttgccaatataaagatgagtacggaaagcatggcggaacgtttgttcttgacatctttaatctctatcttcttgtcattgaaaagaccttctttcaagcgtttctgatattcgggatcctctatcagttccttgccgactttcatggagaataaagcgccgaccaatactccgatgatagtggcgggaatcgtaattttaagaatatcgaataatgtaatgtcgaaacctgccagtaacccgagcaaagctaccgttgcagcagagatgggactggctgtaatagcctgttgcgaagcaatcacagcaatacccagcggacgttccggacgaatctttgtttcggtagctacctcagcaatcacgggcaatacggaataagctacatgcccggttccggcaataaaggtgaacagataagtcaccaatgggctgagcaacgtgacgtgcgaaggatttttgcgtagcaaatgttctgccagtttcaccatatagtccagtccgccggctgcttgcatacaggaggcagcggaaataacggcggcaatcatcaacataacgtcgataggtggtgcggtgggttgtaaaccaaaaacaaacgtgagtattcccaatcctactcctcccatgacaccgagtccgatgcctcccaaacgtgcgccaataataatggctgtcagaacaaatgctaattgtaatatcattggttgttgttttataagttcctaacaaagataaaggatttatcttcgttttttctctgtttctaagataaacaacaaaaaagttattgaatagtttttgcatatttattaaaacaataacatctctgactggttattatatcaactaacgaatgtgttattgttataaaacaaccgatatggaacagaaattatcaaaaaaaactcgtacagagagcgacttgataggtagtcgtgaagtgccggaaagtgcattgtatggagtacagacactccgtggtattgaaaactttcgcatcagcaagtttcatttgaatgagtatcccctgtttattcaggcattggccatcactaaaatgggagctgccgttgccaaccgtgaactggatttattgactgaggaacagacggatgccatactgaaggcttgtaaagaaatactggaaggaaaacatcatgaccaattccctgtagatatgatacagggtggagccggaaccaccaccaatatgaatgccaatgaagtgattgccaaccgtgcactggaactgatgggacatgcacgcggagagtatcactactgctcgcctaacgatcacgtcaatcgttcgcaatctaccaatgatgcgtatcctacagccattcacattggtctgtattatacccatcttaaattggtgaaacactttgcaacactgatcgaggctttccgaaagaaaggagcggagtttgcacacatcatcaagatgggacgtacccaactggaagatgccgtaccgatgacactaggacaaacctttaatggattcgcaagtattttggaacatgaactgaagaatctcgattttgccgcacaggattttctgacggtcaacatgggtgcgacagccatcggaaccggaattaccgccgaaccggaatatgcggaaaagtgcattgctgccctgcgcaagattacaggactggatatcaaactggcagatgacctgataggcgctacttcggatacttcctgcatggtaggatattcttcggccatgcggcgtgtagctgtcaagatgaacaagatttgtaatgatctgaggctattggcttccggtcctcgttgcggactgggagaaatcaatctgcctgccatgcagccgggctcttccattatgccgggaaaggtgaatcctgtcattccggaagtcatgaatcaggtctcttataaagtgataggaaacgacctttgtgtggctatgagtggagaggctgcgcagatggaactgaatgcgatggaacctgtcatggcacaatgctgttttgaatctgcggatttgttgatgaacggttttgatacattgcgtaccttatgtattgatggtatcacagccaatgaagaaaaatgccgtcgggatgtacacaacagtatcggagtagtgaccgcactgaatcctgtaattgggtataaacattctaccaagatagcgaaggaagccctggaaacgggcaaaggagtgtatgaactggtgctggaacataacattctttccaaagaagacttggatacgattttaaaaccggagaatatgataaaaccagtgaggctggatattcatccgaatcattgatttatacctgttgaaggaaaaagagagctatatcctaagtgatatcagttctctttttctattaaataattttatatgggaataattgccaattcatccggtaaaatggttattgatagtctgccggaaagggatgacctttgcagtgtcaatgaaagacgttaataagatgatttctaactaactaaagatatttggatatgaatgcatttgatgttattattatcggtttcggcaaaggcgggaagacccttgcggcagagttcgcgaaacgtggacaaaaagtggctgttgtagaacgttctgataaaatgtacggaggtacgtgtatcaatatcggctgtatcccgactaagacactggtacatcaggcgaagatagcttccggcatgaaaggacttacattcctcgaaaagagcgaattttaccggaatgctgtatctgtgaaagactcggttacgggtgcgctgcgaaataaaaactatcataatctggctgataaccctcatgtgaccgtttacactggattcggctcttttgtatcttcggatacggtatctgtccgcactgcggcggaagagttactgttgacagctaagcaaatcattattaatacaggagcggaaacggtcattccatccattgacggcatagcggacaatccttttgtttataccagcacttccattatggaactcacggatcttccgtgtcatcttgtgattgtcggtggtggttatatcggactggaatttgcatccatgtatgcttccttcggctctcaggtgacagtacttgaaagctatccggaattgattgcgcgcgaagaccgtgacattgctgccagcgtcaaggaaacattggagaagaaaggcattgttttccggatgaacgccaaggtgcagtccgtaaaccatacatcagaaaaagcaattgttgctttcacggactcgcaaatgaacgaggcatttgaattggaggccgatgctgtgctgttggctacaggacgcagaccaaatacgcaaggtcttcatctggaagctgccggagtagaggtggatgcacgtggagccattattgtagatgaatatctgaaaacaacgaatcccgctatccgtgcagtgggtgatgtgaaaggtggtttgcagtttacgtatatctcattggatgactatcggattatcagagaagacttattcggagacgcggagcggaagacaagcgaccgtaatccggtcagctattctgtatttattgacccgcctttggctcgcatcggtctgaatgaagaggaagcacgcaagcagaatctcgatattatcgtgaagaaattgcccgttatggcgataccgagagctaagactttgggagaaacagacgggctgttaaaggcgattattgacaagaagacaggactgattttgggatgtatgctgtttgcacccgattcaagtgaggtgataaacactgttgcactcgctatgaagacagggcaggactatacttttcttcgcgacttcatttttactcaccccagcatgagcgaagcattaaataatttgtttgcgtagtagcatttttccatatactcgtaaaaaaataaaataaataaaggaaacaaattgatcatgtctgttttttagtatattcgtgaaaagtagtatatacatacaaagcaaaactaaaagaatacaaattaaaaacagcgattatgaaaaacaaaccttttgagaattttgactttatagacttctgggatgatgatgaatatgctatgaatgaatatattggcgcacctcctacagaagagatgatagaagaaacagaacgtgaactgggatacaaactccccgaatcttatatttggctgatgaagcagcataacggtggaatacctttcaatgtttgttttccttgcgacgaacctaccagttgggcggacgaccatgtggctatcactggcattatgggagtcgataaggataagatttattctctttgcggacagctcggcagccgtttcatgattgaagaatgggggtatccggacattggagtggctatctgcgactgtccttctgtgggacatgatatgattttccttgattatcgggagtgtggtccgcagggcgaaccgaaagtcgttcatgtcgatcaggaagatgattattatgttactttccttgccgataactttgaagaatttattcggggacttgtcaacgaagaagtctttgatacgtcggaagaagatgaaagaatggagctggaaaaagttcggaacgcagctttctcaccgctcttgtccgatttgtgcgcaaagtgtgatcatcccgtggatacggagcgatggattcggaagatatcggaagagatagtaaccgataaaggattctttgcgcttcatgccgacgaacgttcttatctgctttacgacatccagttgtggctttacaccaacgtttatcccgatacgacggaagaagattacctgtctgcttataaaaagataatagcgctggacggtgagttcagtacgggaggatatgcttcggactttgttaccgattggctgacacgacgcaaggagagcggtatggttacgtgtaatgacggtattctttcgatggcagcgggaactaaggaggccttgctggcaaatcgggagttgatttcgaacaaagagcaataatttgtgtttatttattataaatatatatctttgtcccgaattataaacacgtagatttatgaaaaagatttttggtgctttaatgattgccgtatgtatcggtatggcgatgcctgcccaggcacaattacattttggtgtaaagggtggtttaaacttgtctaaagcaagcttttctgatgtgaaagaaaactttaaaaaggataattttacaggtttctttatcggtccgatggcggaattcaatattccggttgtgggattaggagtcgatgcgtctttgctttttgctcaaagaggtataaaaatctctgatggaggtgaagaagctactgtcaagcagaatggcttggatattccggtcaatttgaaatataacatcggtctgggaagtctggtaggtctttatgtggctgccggtcctgatttttactttgattttgccggtaataagacaatagacggagtaagaaccgataaaaagaaagctgaagtcggtatcaatgtcggcgcaggtgtgaagttgctgaatcatctgcaagtaggagctaattataatattccgttgggcaagactgccagctttgaagacattgaaggctcatacaaaaccaagacttggcaagtatccgttgcttatatattctaagctatccgttactttttatcataaaaagaaagaacttccgatagaggaggctctttttttattctaaggtattttgtttaagatactggtctgtaaacttgaatctattttattaaattccggtgtacagactatttttcttatcagtgttcccttccctcttttaaatccccatttttttattgtacttttgtgcttgcaatgaaaaagtatgtagatgtcatattaccattaccgcttccgaagtactttacctattccctgccggatgaatgtgcggaagaagttgaaatcggatgccgtgtgatagttcctttcggacggaagaagttttatacagctatcgttcgtaatgttcattattgtgctccgacggagtatgaggtgaaggatatatctgcattgctggatgcttctcctattttattgtccactcaatttaagttttgggagtggctggcagattactatctctgtacacaaggagacgtttataaagcggcacttccttccggtttgaagttggagagtgaaacgattgtagaatataatcccgattttgaggcagatgcaccgttgtcggaaagagagcagcgtattcttgatttgctttcagtagattctcagcaatgtgtcacgaaactggagaaggagagtggcatgaaaaatatcctcacagtcatcaaatctctgctggatagagaggccatctttgtgaaagaggaattgcgccgtacttacaagccgaaaacagaggcgagagtacgattagccggttctgctgatgaaaagcggcttcatatcttatttgatatcctgtcccgtgctccgaagcagttggcgttgctgatgaaatatgtcgagtgttcgggaatccttggaagagaaacgccgaaagaagtttcgaaaaaagagctgttgcaacgtgcaggggtgtctccttctattctgaatggcttggtggagaaaaagatatttgagatttactttcatgaagtcggccggctgaatcaggaagtgaaggaggtcgtagagttgaatgccttgaacgagtttcagcagcgggcgcacgatgagattgtgcaatcctttcaggagaaaaatgtctgcctgcttcatggagttacatccagtggaaagacggaagtatacattcatctgatagaagaaacgattcgccaggggaaacaagtattgtatctcttgcctgaaatagcattgactactcaaatcacagaacgcctgcaacgggtattcggttctcgtttggggatttatcattccaagtttccggatgccgaacgggtagagatatggcggaagcaactgggagaaaaaggatatgatatcatccttggagtccgttcttccgtatttcttcctttccgtgatctggggctggtgattgtagacgaagagcatgagaacacctataagcaacaagaccctgctccccgctatcatgcacggaatgcggctatcgtactggctgccatgtatggagcaaaaacgcttctcggcactgctaccccctccatagaaacatggcagaacgcaaggaacggaaaatatggatttgtacaactgaaagaacgatataaagaaattcagctgccggagattattccggtggatatcaaagaactgcatcgcaagaggcggatggtcggacagttctcgccgttgctgatacaatatatgaaagaagcactggaacagaaagaacaagtcattcttttccagaaccgtcgcggatttgcaccgatgatagaatgccgtacttgcggctgggtgccgaaatgtaagaactgcgatgtgagtctgacttatcataaaggcatcaaccaactgacctgccattattgcggctatacctatcaactgccgaagtcctgtcctgcctgtgaaggaacagaactggtcaatcgcggttttggtacggaaaagattgaagatgatatcaaagtcctttttccggaagcggctgttgcccgaatggatttggacactacccgtacccgagctgcctacgagaagattattgccgactttgaacagggaaagacggatatacttatcggtacgcaaatggtttcgaaaggtctggactttgatcacgtaagtatagtgggtatcttaaatgcggacaccatgcttaattatccggatttccgttcttacgaacgtgctttccaactgatggcacaagtagcgggacgagccggacgtaaaaataaacgcgggcgggtggtattgcaaacgaaaagcattgatcaccccattatccatcaggttatcggtaataactatgaagaaatggtagacggtcagctcgccgaacggcaaatgtttcattatcccccttactatcggttggtgtatgtatatctgaaaaaccataatgaagctttgctggaccagatggctgcggtcatggcagataaactaagaaccgtgttcggaaaccgggtattgggaccggacaaacctcccgttgcccgtatccagacattattcatcaaaaagatagtgttgaagatcgaacagaatgccccgatgggacgtgcgcgggaattgctacaacgtatccagaaagagatgctggaagatgagcgctataaatccttgattgtctattatgatgtagacccgatgtagcacttgatacagacctaatattttccttataataacctttataaattaactaaccatgaaacgacttacgatttattgcttaacatgtcttattggtgtgagtcctctttttgcccagcaaggagtgacgcagtgtggaacccctacggggcaaccgaaatttccaattgaaacttatcaggaactgcccgatccttcttccccctctgataaagactgggcagcagttaccatccctcagatttcctggggaacaattgacacccgctatgcgaagcatcggcttccccagctgaaaaagcagcagcttaccactttaaaaggctggcgtggcgaacgtgtaaacgcgcaggctgttgtctggaccggcactgaggtgaaagatctgaacttcagctttaccgattttaaagataaaaaaggaaatagtctttcggatgaggcgtttaaagccggtttcatccgttatgtaatgaccgatgaactgaataaagatggcagaggcgcgtgcggtcaccgtcaagcagtggattacgattcgttgttggtagccgacccgattgatacgaacttgaaatcaatgtctgttccggcacgtaccgttcagcctatctgggtgcaatgttggattcctcaatcggctactcccggaacctacaagggtgctttgctggtaaaagacggttcccgtctgttgcagcagcttaatctcgaaatcctcgtttcttcccgtgaacttcctgcaccgtccgaatgggcttatcatctggatttgtggcagagcccgtttgccgtagcccgttattatcaggttcccttgtggagccaggagcatctggacgctatgcgcccgctgatgaaaatgctggcagatgccggtcaaaagattatcacagccactttgacacataaaccctggaacggtcagactgaagattatttcgagacgatggttacatggatgaaacgtgccgacggtacttgggctttcgactatacggtttttgatcgctgggtagagtttatgatgagtgtcggtatcgatcagcagattaactgttactctatggttccctgggaattatctttccagtattttgatcaggcaacaaattcattgaagtttgtaaagacagcaccgggagaacctgcttatgaagaaatgtgggttgcgatgcttacttctttttccaagcatctgagagaaaaaggatggtttgatatttgtgcgattgcgatggatgagcgtccgatggatgtaatgcagaaaacgttgaaagtaatccgtaaggcagatccggagtttaaagtttcactggccggtaattatcatgctgagatagagccggacttgtacgattattgcattgttatcggacagaacttcccggaagaagtgcgtctccgccgtgcggccgagaataaacgtaccacctattatacttgttgtacggaagcacatcccaatacattcactttttccgaccctgctgaggctgcatgggtgagtttctattcttcgaagaagcatctggacggctatctgcgttgggcatacaatagctggcctttggagccgttgctcgattcacgtttccgcacgtgggcggcaggagatacttatctcgtgtatccgggagcccgtagctgtatccgtttcgaacgtttgatcgaaggtattcaggcacatgagaaaataacgattcttcgtcaggaatttgagaagaagggaaataaagccggattaaagaagatagagaaaatgctggccccgttcaatttgggtaatatgccggaaataccggcagccgttaccgtaaaccgggccaatcagatacttaattcgttttgataatagaaacgaatgaagcctgtcaattattaaacgtaaattatgaagaaaatattatttgtctgcctcggaaatatctgccgtagctctacggcggaaggagtaatgcttcacctgatcaaagaagccggactggaagaagaatttgtgattgattccgccggaatcctgtcttatcatcaaggcgagttgccggatagccggatgcgtgcacacgctgcccgtcgtggttatcaactggttcatcgctcccgtccggtgcggacagaggacttttataattttgatctgattattggcatggacgaccgtaacatagatgatctgaaagaaaaagctccttctacggaagagtggaaaaagattcatcgcatgacggagtactgtacccgcattcccgccgaccatgtccccgacccctactatggaggggccgaaggatttgaatatgtgctggatgtactcgaagacgcttgtgccggtctgcttacttctttaactcaggataactgatccgtgtgtgataagcgattttcagcttttctttgaataccgtcttgatggtcgcaatgtccttgaaagtgatagggcactctttgaaataaccttcagcaacttgggagtcaatgatcttgtcgaccaagttgctgatagtttcttccgtatattccggcagactgcgtgacgccgcttcgacagcatccgccatcatcagaatagctgtctcctttgagaaaggattaggacctggataggtgaacagttcttcattcggttcctcgtcggggtgctcgttcttccatgagatataaaagaacttcgttttcccccgtccatgatgggtgctgataaagtctttgattactttcggcagattatgcttgtccgccagtttcaatccgtctgtcacatgactgatcacgacctgggcactttgctcataattcagattcttatgaggattgacgcctcccgactgattctccgtaaagaaagcgggattctccatcttgccgatatcatgatataaagctccggtacgtactaattgacttttcgctccaatacggatcgctgcttctgccgccagattggctacctgcatagagtgctggaaagttccgggcactgtttcggacatctgtcggagaagatcactgttgatattggaaagttcgaccaaagtcacattagaggtaaagccgaacgtcttttccagcagaaacagcaacggatatgtaaacagcagcagaataccattaataaagaaataggtatacatccgtgcattcaacttagagaagtcattggcaagtccgttctcggtcattagctcgaatgcgaagtaaatagccgcataagtcagtatcaccaataaggccgtgcggaagagctgtgacctctgcgaaagttcccttaaactgaaaatggcaactaatccggcagccaactgcgtcagaatgaactcatgcggaaaacgcagggatatagagcagattaatatcgtaatgacatgcgtcaggaaggcagttcgtgaatcgaggaaaacccgtatgatgatgggcagcatcgcatacggaatcatatatacattaaatatattatgtgataccatgaaagctgttaccacactataaaatacaatcagtgtaaacagtaacgacaggctgcctttgcgctcataataatcttttcggaacaggtcgagatagagcataaagcaaagcatcagcataccgacaaacaaaatctgcccgccaagaatcaagcggctctgatcaatggattcactgcgcttgatagactctttgcgtaatgattccagaatattgtacgtttccggactgatgatttctccacggtctataattttctgcccgctgacgactaatccgttggcccaggaatagttgttcagcatttcctctttggcggtctgtgtccgttgctggtcgaatgtgagattgggagtgatgtattcgtttaaagaacattgtctcagaatctcacggttgaagtgggtcgtatctgcggatagcaagtactcataagcttttttgaccgtatatatatgatcggtaggcttggagtttgcgagcttgtcgtcgataatcatgatcgccgaagtgctgtccttgtggagttcttgtatgttttctgtcgaaacgatgccctctccgtatatttcttttaatgtccgttcgatgtatcgcagataatctacggaaggaagtatacctttcaggtgagtatggtaattctctttcagcttggcgattgcgtctttctctacttgtttgttaagcagataataaggttggaaggaagccagcagactatcctgttcccggttcaccactgcgtcgtctttatagatcggaaagtcaaaagtggctatcaactgcccgtacttccagggcttgtttatgtcaaactgatagttgaattttccgtcacgtggcaggaaatagacaatcagtgtcactgtcgctacaaacagcaatgatttatataatatatctcttcttgagaacctctttttcttcttcatatgttccatacgcattgaaatttttgcgaaaagtacaaaaaaaaacaatagtgtggaaaaaaaggtttaattttgccacgatttacctatactaacccaaattatggcagaaagaaaagtaagagttcgttttgctccgagtcctacgggagcattgcacatcggtggtgtgcgtacagctttgtataattatctatttgcgcgtcaacacggcggagacctcattttccgtattgaagatactgactccaaccggttcgtgccgggagcggaagagtatatacttgagtcattcaagtggttgggtatccactttgacgaaggagtgagcttcggtggagaacacggcccgtaccgtcagtccgaacgtcgcgaaatctataagaaatacgtgcagattttgttggataatgacaaggcatacatcgcttttgatactcctgaggaactggatgctaagcgtgcggaaattgctaacttccaatatgatgcatctacccgcgggatgatgcgcaattctctgacaatgtcgaaagaagaagtggacgcattgattgctgaaggaaagcaatatgtggtccgctttaagatcgagccgaacgaggatgttcacgtgaatgacttgattcgtggcgaagtcgttattaattcatctattctggatgacaaggtgctttataagtcggctgacgaactgcctacttatcatctcgcaaacattgtggatgaccatttgatggaagtgtctcatgtaatccgtggcgaagaatggttgccttcggcaccgttgcacgtacttttgtaccgtgcattcggctgggaagacacgatgccggaatttgcccacttgcctttgctgctgaagccggaaggaaacggtaaactaagcaagcgtgacggcgaccgtttgggattccctgtattcccgttggaatggcgtccggaatcgggagaagtgtcttccggatatcgtgaatcgggttatttgcccgaagcggtgattaacttcctggctttgttgggatggaatccgggcaacgatcaggaagtgatgtctatggacgagatgataaaactgttcgacattcatcgttgcagcaagtccggagctaaattcgactataaaaaaggtatttggttcaatcatcagtatatccagcttaaaccgaatgaagaaattgccgaactgtttttgcctgtgctgaaagagcatggggtagaggctcctttcgagaaggtcgttacggtagtcggcatgatgaaagaccgtgcaagttttatcaaggaactgtgggatgtttgtagcttcttctttgtggctcctgctgaatatgacgaaaagacagtgaagaaacgctggaaagaagactcggcaaaatgtatgactgagttggcggaagtaattgccggcatcgaggatttcagcattgaaggtcaggagaaaatagtgatggactggattgctgaaaaaggttaccatacaggtaatataatgaatgctttccgtctgacactggtgggcgaaggaaaaggtccgcatatgttcgatatttcctgggtgttgggcaaggaagagacattggctcgtatgaagcgcgccgtagaggtacttaaataattaggatttgtaaattatgctttacaatctggcaatagttatttatgaccttttggttcattttgctgctccgttcagccgtaagccccgaaaaatgatgaaagggcattgggtggtgtatgaacttctacgacagcaagtggagaaaggggagcagtatatttggtttcacgctgcttcgcttggcgagtttgaacaagggcgtccattaatagaaatgatcagggaaaaatatcccgattataagatattgcttacatttttctctccgtccggttacgaagtgcgcaagcattaccggggagcggacattgtttgctatctgccgtttgataaaccgcggaatgtgaagaagttcctggatatcgcaaacccgtgcatggcattctttatcaagtacgaattttggaagaattacctggatgagcttcataagcgtcgcatcccggtgtatagcgtttcttccattttccgtcgcgatcagatattctttaaatggtatggtgggacttatcgcaatgtgctgaaggatttcgatcatttgtttgtgcagaatgaggcttccaaacgctatttgtcgaagattggcattagtcgtgtgacagtggtgggagatacccgtttcgaccgtgtgttgcagattcgggaagaggccaaagaccttccgttggtgaaaatgtttaaaggagacaatgcctttacgtttgtagccggcagttcttggggaccggatgaagatttatttctggagtacttcaacacccatccggaaatgaagttgatcatcgctccgcatgtgattgatgaaaatcatctggtggagattatcagtaaactgaaacgtccttatgtacgctatactcgtgctgacgaaaagaatgtactgaaagttgattgcttgattatcgattgcttcggactgttatcttctatttaccgctatggagaagtggcttatatcggaggtggttttggcgtcggtattcataatacgctggaagctgctgtatatggcatccctgttatcttcggaccgaaatatcagaagtttatggaagcaatccggttgctcgaagctaaaggcgcatactcaattaaagactatcacgagttgaaaaccttgctggaccgttttcaggcagatgacgttttcatgcgtgagactggtgcgaatgccggttattatgtgaccagtaatgccggagctacggagaagatcatgcacatgattaacttttagagacggataaggttgggcgtcgcctgaaaaacaggtaagccctatcatttcgctctgctgttctgagcttgtcgtctcgtttttcttaaagaagagagattcgtcaatgaactcagaatataacagaataagataagaataaggagatgtgtcagaactccccttttaacgaattcatctttgccacaactatctgtagcgaagatgaattttaatttataaaggtttcgatacacccgcttaccagtacatcttttgaaaatgttggtattctatttgtttatttcctgttttagtaactcttccagttcttttcgtgtcacatgggtgaatcgtttcactatatttccttgcttatctatcaccaaatacatgggcaaacctttcatctgaaaatgtttccaaagataaccccattgcttttcgtttaaccaataatgttcaccgacaatgtcttgtatgagtattttccaagtcttttcgatggaactggggccagttaggtagacaaaagctacgttttcgcctaattcttttttaataggttcatattctttaatcgtccttcggcagccaccgcaccaggtagcccaaaagtcaatgaattgtacttttcctttatggcggtcgacgagagcagacagtaattcttcttctgatactttaggtgcttcgcagacagagtatttctttgttgtcgcttttgcgcgtggttgcatctgtcggttcatgtcttgaatgattcctaagaaaatcgggtttgtaatttccgttgccatagcttcttgttgagtggttagtggttttaaattatataggctggagcgcatatagattgcccgtatataatcgaccattaaacaagtgctgtcttgcatgatatggctcagatactccttcgctttggtgaatagtttctgactgaattcattatattctttggggtattttgcaataagcgagatcagctcgctgccttgttggaaggggatacctgttttgagagctgtctcgtattggcgaataagcgcttgttcctcctttgtaagcgctgcttttgatagtaaatacttctcaaattttaaaggatcatgatgtagctcatagagttctcctgagatcacgttgcggtaattgtagcaatagagcgctaagggatgattgacagggaaattctttaggaaatcatagaaattggcaggaaaatcaaaattggcaaaggctgtactggcttgttcacgcgtgatgttttccttcttctgataagccgtttgcagacaataacgggttgcattcagattctctatgcaatcgaacgcacatgagagattggcaagtgtgcgggtatcttcactaaattgcgtttttgtgttgttgtgtgccacgcactgtttgtattggtcgatgcagcgtttcttaaattcattggcgctgatgcctgcaatagaatccagtatgtcgccatttctataaaccggagctattcttgtaatcaattctggctggcaccattcattattgatggtagcatattgtccgctgaatacaaattgttttccttgcggattgcttagattgaccgctacattagtttctttatcgggacttagcagaatgactatatcggctttccctatcgtcatccgtacttgtgtgttatgatagagaggaatattgattttgaagcttccgtctgcttcgatagtcgggaagagggtttcggctgcccccatcacaatattaggagctccgattttgaggtccggatgatcatcagggctataattagctattgtgccgcttagtatggcttttcctttttgatattcgggactccgtaattgtgcttgtactatgttgaatagcagagacaagaaaaggaaggtaaacagtctgttcataatagttctttgattgcatttataatttctttatctgtattctctgtgctatatcctctgattatttttcgtatgattcgtttctggtccagtatgaaaaagaagggtgcagcaccacctgtctggtattgtttgataacttcgttcgtggcatttagaatcgtataattcaaatctttccgcttggcgtagtttcggatggcggatgcattgtggctccaggattctatagcaatgagatcaaactcctcgttgctgaataactcttttaactttttcagaaaaggtacagctgcctggcaggcgccacagccaatgccggtgaaattgattagtatgactttgcttttgcagttggcaagtgatagagactgtccatctatattttctaatatccatcccggagcttttttgcctgtgagtccggatgtggatggcgagtctccgcttttcttgtggagatcgctgtatttaactgtttcataatctttggggaaataatcattgatgttaaagtctctgatgttgagcttgttaatctgaaggttggaacaagttgaaacggaaatatcatgtgacatttcccttcgctccttaaaaggtaaattatccgatttattaatccataattcataaatagaagtcgtattgccgatatcgaatgggggaagaggcatgtggaaggcttttccaaagaattcaacctgttgttcctcattgattgttagtttgaaatagtaatcattaccctcgtctttcagttctatggtgatattatcatcagtggtaagcgcatacttgatgatgttctttgcgaaattgaagaatggaggtcttactagcctgaaagggagtggtttgaatgtgaagtcatcaattactaactttttattatcgtgataggcttctactcttacgttaccatcataacaaaagtttagctttgtagtatccttggcatccagtgaaacatagcttgcgccgatggttgaatctatggggtgattatattctttgatgaatccatgtagaatggataatgcggtggagtccccgggttgccagctttcgttagcaacataatatgttgcggattcaattttctctagattggcaaataccttttttaaatagtctctctctctgttttgagcattgactgccggcattgttgcaaaaaggagagtaataagcagtagttttgttttcatgattgatcgtggagtagtatgttttctatagttagatgtttttattctgtttgattacaaatctacgaataattcgtaaattagaggcaggcaattggttaaataaaacaaatgaatccatgaactccttcatggatattagctgatccaatacgctcctttgctaatttttcaaagatcagagatgcattgaatatagtaccctgaaaacacatgaacttactaatgatctggaacctgatatttatattattcatgtgaatcagtagttgaatgttgttcatttctttgcggttttgaactaaatgatagtcaatagtatcttaaatgggctgtctaaaaagtcaatagtatcttaactctcctccttctggaaggaggagtacccgtagggggaggtggtaggtgaatacataatcctatcatttacaaagaaataggaacaaacattatctctcctaccacctcggtcttcgaccactcctccttcccgaaggaggagattcgagatagaatcgactttttagtcacccccaatggagatactactgtttgattcattcctttgcaattttgaatcaactactgattcacattatttataccattgggaatacatcaggtaattgtgagcgattttttggtttagctcctttgcttgctccgggtctaccttcttaataaatttagccggtacccctccccaaatgcttccgggctcgatcactgtattgctcaataccaaagaaccggcggcaacgatggagccttcgcctactacggcatgatccaatatggtagaccccatcccgataagtgcataatctttgacggttgctccgtgaatcgtcacattatgtcctacggaaacatgatcaccaatttcgatggttgacttctcatataaagtatgtagcacgcttccatcctgaatattgactccattgcctatccgtatggaattaacgtcaccgcgcaatacggtacaaaaccagatgctacagtcatttcctatttttacatctcctatgatagttgcattgtctgcgagaaaacagttctctccaatttcgggggtaaagccccgcactgatttgattaaagccataaaatatattgtttctaatgatgtttttattgaatatgattggggattgtctgacacccgggtctcgtaccgtctgacacccgggtctcaagcagcctgacacccgggtgtcggtatgctcaacacccgggtgtcagacaaaagctgttttaaatagcttttgttgcttctagcagccacttcttttcttcttcgtttagacttggagaaagtttttcgtaaacggttcgatggtagtcattgaaccacttgacttcctctgccgtcagcatttctttgatgatgccttttttgcagatcgggcatagggtgatcgtctcaaatttgaaatattctccgaacatgccttccttatctttgcagaccaatgtcagattctcggtgcgtatcccgtggctgcctgctttataaacaccaggttcattggatgtaaccataccgggttgcagcacaatgggattttcgttcatacggatactttgcggaccttcgtgtacgctcagaaaatgtcctacgccatgtccggtaccatgaaggaagttcatgccatgactccagataggcatacgggccaatacatcgagttgggcgccgcgggttccggctggaaatttagccattgccaatgcaatatggccttttaatattaaggtatagtctgttttttcttcctccgtcagttcgcctaatgcaatagtacgtgtgatgtcagttgttccgtccagatactgtgctcccgaatctaacagcaagaaacctttaggctgaagcgtgacatcactctcctccgttgcggaatagtgcacgattgctccatgttctttatatccggcgattgtgtcgaaactttctcccatatacaaaggttgggctgctctgaactcatgcagcttccggtctacgctcagttcggtctctttgcccgaaggcactgattgttccagccatttaaggaacctgacaagcgccacgccatcccgctgcattgcgtgatggatgccgacgatctcctgctcattgcgaatggctttcagcaatgtcacaggagattctccacgaatgatcttgcatgcaggattgatagccgaataaatcgcatagttcgttttctttgggtcgataagtatgttttctcctgcaaaagaattcaggaaagattcagcttcatcatattttctcaggctgacttgctgttcttgcaagtattcatttacctcttgggtaatcttctccggcgaaataaagtagactacttcatcttgagtaaccagtagataacttactataaccggattgcaatgcacatcacttcctctcagattgagagtccatgctatttcgtccagactggataaaaataaagcatagatgcctttctttttcagctcggcacgaatggcggcaactttttctccacaactttttcctgcatatttaacatcgtagatgaaagccggagcatcaggcatggatggacggtccttccagatgtttttcagcggatcgccaaacaggttgacctgtaactggtagggggcaagatcttctttcatttgttccacctgttgtacggagaacattttcccatcaatactcacagattctcccggctttagattctgacagaggaactttgtgatactaggagtttccggcagcatctctttatataatgtaatgccgctgccttccagttccttttccgcttgcaggaaataacgggaatctgtccatagtccggctttatccattaagatgacgactgttccggcggaacccgtgaaaccggaaatccattcacgggacatccaataaggagctacatactcactcaggtgaggatcggtgctgggaatgatgaacgctttgatattgttagggcggaatgccatccgtagtgcgtgtatacgctcttttatgctctgcttcataccttattatattatttatagacatatttaagagtttcaaaggtactaacttttcgcggttaatgatttgtttatgaatagtttttgagaaatatttgccgaaagttttgtgaataaagaaagtatgtgtaattttgcggcgcaatttgactgcggaaatttttaaccaataacatattaataataacaaaatgattgtagtacctgtaaaagaaggcgaaaacattgaaaaagcgctgaagaagtttaaaagaaaatttgagaaaactggcatcgtgaaagaattaagaagcagacagcaatttgataaaccgtctgtaactaaaagacttaagaaagagcgtgcagtttatgtacaacaacttcagcaagtagaagattaataattcgtaatttcctttgaattattgaattcttttcatacattcgttgcacgattttagatgtagcgatattatgttaattaaatcttttcttgattacctccggtatgagcggaattattccgaaaaaaccgttctggcgtatggcgaggatataaagcaactacaggagtttgctcaggaagagtacggaaagtttgatccgttggaagtggaaggtgaactgattcgtgaatggattgtttcattaatggacaggggatatacttcaacttctgtaaatcgaaagctaagttcgctccggtcgttctataagtatcttttaaggcaaggagaggtgaccgtagatccgttacgaaaaataacaggacctaagaataagaaaccgttacctgtctttctgaaagagagcgaaatggataagttgctggatgatacggattttggcgaaggatttaaaggttgtcgtgatcggttgattatcgaaatgttttatgctacaggcatgagactatcggaattgataggtctggatgataaggatgtggatttttctgcttctcttttgaaagtaaccgggaaaagaaacaagcaacggctaataccgttcggtgatgaactgaaagagttgatgcttgaatatattaatgtaagaaacgaagcgattccggaaaggtcgaaggctttctttattaaagaggatggcggacggctttataagaatctagtctataatttagtgaaacggaacctgtcaaaggtggcgacgttgaaaaaaagaagtcctcacgtgctgaggcatacttttgctaccacaatgctgaataatgatgcagaattgggtgcggtaaaagaacttttgggtcacgagagtattgcaactaccgagatctatgcgcatgccacatttgaagaacttaaaaaagtgtataaacaagctcatccaagagcttaaaaaaaggaggtaagtatggatattagaattcaatcaattcactttgatgcgtcagagcaattgcaggcatttattcagaagaaagtgtctaagttggaaaaatattacgaagatataaagaaagtagaggtgtcattaaaggtagttaagccggaagctgctgaaaataaagaggcaggcataaagattcttattcctaatggtgagttttatgcaagtaaagtgtgcgatacattcgaggaagcagttgatttggatgtggaagcacttgaaaaacaactggtgaaatacaaggaaaaacagcgtagcaaataaaaaaatcgcaaatattttgcggaaaagaaataaataactaaatttgcagccgtttcgctcgcgttagaacgtgacggttgcattttttagctagaatgcctctttagctcagttggccagagcacgtgatttgtaatctcggggtcgttggttcgaatccgacaagaggctccaaggatgaatgaggatcatccgattttagcgaaagggatgacggcagtcaattcggttcgcatggcggggaagaattagaagaagaactgagaataaaacatctatgttcagagtattgttcgctatttgattttaattctttgtttgaaatattaagggcaaataccagagtggccaaatggggcagactgtaaatctgctgtctttcgacttcggtggttcgaatccatctttgcccacaatcagagtgacaactttggcaagaatgcggaagtagctcagttgatagagcattagccttccaagctgagggtcgcgggtttgagccccgtcttccgctctttttttcttgctgttatagctcagcggtagagcacttccttggtaaggaagaggtcccgggttcaagtcccggtaacagctcataaagatgtaaatgctgattattaatcaaataaataacaagtaaagctatggctaaagagaaatttgaacgtaccaaaccgcacgtaaacattggtacaatcggtcacgtagaccacggtaagacaacgttgacagctgctatcactactgtgttggcaaaaaaaggtctttctgaattgcgttctttcgattctatcgacaacgctcctgaagaaaaagaaagaggtattactatcaatacttcacacgttgagtacgaaacagctaaccgtcactacgcacacgttgactgtccgggacacgccgactacgtaaagaacatggtaactggtgctgctcagatggacggtgctatcatcgtttgtgctgcaactgatggtccgatgcctcagactcgcgaacatatcctgttggctcgtcaggtaaacgtacctcgtctggttgtattcttgaacaagtgcgatatggtagacgacgaagaaatgttggaactcgttgaaatggaaatgagagaacttctttcattctatgatttcgatggtgacaatactcctatcatccagggttctgctcttggcgcattgaacggtgttgaaaaatgggaagacaaagttatggaactgatggatgcagttgataactggattccacttcctccgcgcgatgttgataaaccattcttgatgccggttgaagacgtgttctctatcacaggtcgtggtactgtagcaacaggtcgtatcgaatctggtatcatccacgtaggtgatgaagttgaaatccttggtttaggtgaagataagaaatcagttgtaactggtgttgaaatgttccgtaaactgttggatcagggtgaagctggtgacaacgtaggcttgttgctccgtggtgttgacaagaacgaaatcaaacgtggtatggttctttgtaaaccgggtcagattaaaccgcactctcgcttcaaagctgaggtttatatcctgaagaaagaagaaggtggtcgtcacactccgttccacaacaaataccgtcctcagttctacttgcgtactatggactgtacaggtgaaatcactttgccggaaggaacagaaatggtaatgccgggtgataacgtaactatcactgtagagttgatctacccagtagcattgaacccaggtcttcgtttcgctatccgcgaaggtggacgtacagtaggtgctggtcagattactgaaattatcgactaatacacaataattaatcagttcccggttttactatcgggaactgattatgtacaaacgggagtagctcagttggtagagcaccggtctccaaaaccgggtgtcgggagttcgagcctctcctcccgtgctaatattattgaaatgaaaaaggtaatagcttatattaaagaatcttacgacgaacttgttcataaagtatcgtggcctacgtattccgaacttgctaacagtgcagtagttgttttatatgcttccctgcttattgcattggtagtatggggtatggatgtctgtttccagaacttcatggaaaaaattgtttatccacattaaaaaattaggaattgaaaatggctgagattgaaaagaaatggtacgttctgcgtgctattagcggaaaagaagctaaggtaaaggaatatcttgaagctgaccttaaaaacagcgaccttggtgaatatgtatctcaggtattgattccaactgaaaaagtgtatcaggttcgcaatggtaaaaaaattgtgaaagagagaagttatctccctggttacgttttggtggaggctgctttggttggtgaggtcgctcatcatctgcgcaatactccgaatgtgataggctttttaggcggctccgagaaaccggtgcctctcagacaatcagaagtgaatcgtatacttggtacagtagacgaactacaggaaacgggtgaagaactcaatattccgtatgtagtgggtgagactgtgaaagttacttttggtcctttcagcggattcagtggtatcattgaagaagtgaatagtgaaaagaagaaactaaaggtcatggtgaagatattcgggcgcaaaacgccgcttgaattaggctttatgcaagtggaaaaagaataacgcggaattgttacgctgttgttgttcttcgtttaatgtttatatataaatcaataaaaaaatggctaaagaagttgctggactaatcaagttacagattaaaggaggcgctgcaaatccatcacccccagttggacctgctttgggttccaagggtattaatatcatggaattttgcaagcaattcaatgccagaacccaagacaaggcaggtaagattttgcctgttatcattacttactacgcagataagtctttcgattttgtaatcaagactcctcccgttgctattcaattgcttgaagtagctaaggtaaagagtggttctgctgagcctaaccgtaagaaagttgccgagcttacttgggaacagattcgtacgatcgctcaggacaaaatggttgacttaaactgttttactgtggatgctgccatgagaatggttgctggtacagctagaagtatgggtatcgctgtaaaaggggagttcccggttaataactaataaacttcaattgtaatgggtaaactgacaaaaaatcaaaagttagctgcagaaaaaattgaagcagggaaagcatactcactgaaagaagctgcatctttagtaaaagaaattactttcactaaatttgatgcctcactggatattgacgtacgtttaggtgtagacccacgtaaagctaaccagatggtgagaggtgttgtttcacttcctcatggtactggtaaagaagtacgtgttttggtactctgtacaccggatgctgaagctgctgcaaaagaagctggtgctgactatgttggtcttgacgaatatattgaaaagatcaaaggtggatggactgatattgatgtaatcatcactatgccatctatcatgggtaaaattggtgcactcggtcgtgtactcggtcctcgtggattgatgcctaacccgaagagtggtactgtaactatggatgttgctaaagctgtaaaagaagtaaaacaaggtaagattgactttaaagttgataagagcggtattgttcatacttctatcggtaaggtatcattcagtcctgatcagattcgcgacaacgcgaaagagttcatctctactctgaacaaactgaaaccgaccgcagcaaagggtacatatattaagagtatttatctttctagtacaatgagtgcgggtatcaaaatcgacccgaaatcagtggatgaaatctaataaaacagagaaataatgagaaaggaagataaaaattcgattatagagcaaattgctgctacagtaaaggaatatggccacttctatttggtagacgttacagcgatgaacgctactgctacaagtgcattgagaagagattgtttcaagtctgacatcaaattgatggtagttaagaatacattgcttcacaaagctcttgaaagcctggaagaagacttttctcctctttacggttctttgaaaggtacaactgctgttatgttttgcaatactgcaaacgtacctgctaaactgatcaaagacaaagctaaagacggaattcccggactgaaagctgcatatgcagaagaaagcttctacgttggtgcagaccaattggatgctctcgttgctatcaagagtaagaacgaagttatcgccgatatcgttgcattgttgcaatctccggccaagaatgttatttctgctcttcaatcaggtggtaacacccttcacggagttctcaaaactcttggtgagagacccgaataattttcaaaaaacaacaaagtatttaaacaattaaaatcatacaaaaaatggcagatttgaaagcttttgcagaacaattagttaacttgacagtaaaagaagttaatgaacttgcaactatccttaaagaagaatacggtattgaacctgctgctgcagctgttgctgttgctgctggtcctgcagctggtgctgctgctgtagaagaaaaaacttctttcgacgtagtattgaagagcgctggtgcagctaaacttcaggttgttaaggccgttaaggaagcttgtggtcttggcttgaaagaagctaaggacatggtagacggtgctcctagtgtagtaaaagaaggtttggctaaagacgaagcagaatcattgaagaaaacattggaagaagctggagctgaagttgaacttaaataacattagcctggtaatcaggtaattcggttaggaatccttcgcaagaggattcttaacctttttgtgtatatatttcaaattaagttctccaaattcattcacagatgtcttcaaatactgtaaatcaaagagttaattttgcttcgactaagaatccgcttgaatatccggatttcctggaagtacaattgaagtcattccaagactttctacaattagataccccacctgaaaagcgcaagaatgagggtttgtataaagtatttgctgaaaacttccctattgccgatacaagaaacaattttgttcttgagtttttggattattatattgatccgccgcgctataccatcgatgattgtatagagcgtgggctcacatatagtgttcctttgaaagcgaaacttaagctgtactgtaccgaccccgatcacgaggattttgatacagttattcaggacgtattcctcggcccgatcccttacatgactgataaggctactttcgtcattaacggtgccgaacgtgtagttgtgtcacagcttcaccgttctccgggtgtgttcttcggtcagagtgtacatgccaatggtacgaaactttactcggctcgtattattccgtttaaaggttcgtggattgagtttgctaccgacatcaataatgtgatgtacgcatacatcgaccgtaagaagaaattgccggtaactactttgttacgcgcgattggcttcgagaacgataaggatattcttgagattttcaaccttgcagaagatgttaaggtaaacaaaacaaatctgaagagagttctgggtcgtaagttagctgcacgtgttttgaaaacatggattgaagatttcgttgatgaagataccggtgaagtggtttctatcgaacgtaacgaggttattatcgaccgtgaaaccgtactggaggaagtacatattgatgaaattctggaatcgggagttcaaaacatccttttgcataaggacgagccgaatcaatctgatttctctattatatataatactctgcagaaggacccgagtaactcggaaaaagaagctgtgttgtatatctatcgtcaattgcgtaacgccgatccggccgatgatgcaagtgcacgtgaagttatcaacaacttgttcttctcagaaaaacgatatgaccttggtgatgtaggtcgttacagaatcaacaagaaactgaatctgacgactgatatggacgtgcgtgtcctcacgaaggaagatatcattgaaatcatcaaatatctgattgagttgattaattcaaaagcagatgtggatgatattgaccacttgagcaaccgtcgtgtacgtacagtaggtgaacagctttctaaccagtttgctgttggtctggctcgtatgtctcgtacgattcgtgaacgtatgaacgttcgtgacaatgaagtatttactccgattgatttgatcaatgcgaagactatttcttctgtgatcaattctttctttggaacaaatgctttgtcacagttcatggaccagacaaacccgttggctgaaattacgcacaagcgccgtatgtctgccctaggtcctggtggtctttctcgtgaacgtgccggatttgaggttcgtgacgttcactatacacactacggtcgtctttgtccgattgagactcctgaaggtccgaatatcggtttgatttcttccttgtgtgtattcgctaaaattaatgagctgggattcattgaaactccgtaccgtaaggtggaaaacggaaaagtggatctttccgataatggtctggtttatctgactgctgaagaagaagaagaaaagattattgcacagggtaatgctccgttgaatgatgacggtacatttgttcgcaataaagttaaatctcgtcaggacgctgacttcccggttgtagaaccgtctgaagtagatttgatggacgtttctcctcagcagattgcatcgattgctgcttcactgattccgttcctggaacatgatgatgctaaccgtgcattgatgggatcaaacatgatgcgccaggcagttcctttgttgagaagtgaagctccgattgtaggtacaggtatcgaacgacagttagtgagagactctcgcacgcagattactgcagaaggcgatggtgttgttgacttcgttgatgctactacgatccgtattttgtatgaccgtacagaggacgaagaatttgtaagcttcgagcctgctttgaaagaatatagaattccgaagttccgtaagacgaaccagaacatgactattgacttgcgtccgatttgtgacaaaggtcagcgcgtgaagaagggtgacatcctgactgaaggttattctactgaaaagggtgaattagctttgggtaaaaacctgttggttgcttatatgccatggaagggatataactatgaggatgctatcgtattgaacgaacgcgtggttcgcgaggacttgttgacttctgttcacgtagaagaatactctttggaagttcgtgaaacgaagcgcggtatggaagaattgacttctgatattccgaatgtaagtgaggaagctactaaagacctggatgaaaatggtatcgtaagaatcggtgcgcgtatcgaaccgggtgatatcatgatcggtaagattactccgaaaggtgaatctgatccttctccggaagaaaaactacttcgtgctatcttcggtgataaggcaggtgatgtgaaagatgcttctttaaaagcttctccttctttgaaaggtgttgttattgataagaaacttttctcacgtgtaatcaagaaccgtagctctaaactggcggataaagcattgttgcctaagattgacgatgagtttgaatcaaaggttgcagacttgaagcgtattctggttaagaaactgatgactttgactgaaggcaaggtttctcagggtgtgaaagactacttaggagcagaagttattgctaagggatctaagttcagtgcttctgattttgattcacttgactttacttctattcagctgagtaactggactagtgatgaccatactaatggtatggttcgtgatctggttatgaactttatcaagaaatacaaagagctggatgctgaattgaagcgtaagaagtttgctatcactatcggtgatgaacttccggctggtatcattcagatggctaaagtatatattgctaagaaacgtaagattggtgtaggtgataagatggcaggtcgtcacggtaacaagggtatcgtgtcacgtgttgtgcgtcaggaagatatgccgttcttggcagatggtactccggttgacattgtactgaatccgttgggtgtgccttctcgtatgaacattggtcagatttttgaagctgtattaggtcgtgccggaaaaactttgggcgtgaaatttgcaactcctatttttgacggtgctacgatggacgacttggatcagtggacagacaaagcgggattgccacgttactgtaaaacttatctttgtgatggtggtacaggtgagcaatttgaccaggcagcaaccgtaggtgtgacttatatgctgaagctggggcacatggttgaagacaagatgcacgctcgttctatcggtccgtactcattgattactcagcaacctcttggtggtaaagcacagttcggtggtcagcgtttcggagaaatggaggtttgggcactcgaaggcttcggtgctgctcatatcctgcaggaaatcttgactattaagtctgacgacgtagtaggacgttctaaggcttatgaagcaattgtgaaaggtgaaccgatgccgcaacccggtattccggaatccttgaacgtattgttacacgagttgagaggtttaggtttgagtatcaacctagaataaaataatgaaagaatgcaggatgtcaataggccgatgaaggtctgttgacattcgcatcttcttcaatttccaatgattcaattatcaaatctcaattatatagagtatggcttttagaaaagaaaataagacgaaaagcaatttctcgaagatctcaattggtctggcttctccggaagaaatcctagagaattcgagtggtgaagttttgaagcctgaaaccataaattaccgtacgtacaaacccgaacgcgatggtttgttctgcgagcgcatttttggtcctattaaggattacgaatgccattgcggtaaatataagcgtatccgttataaaggtatcgtctgcgaccgttgtggtgtagaagttacagaaaagaaagtacgccgtgaacgtatgggacatatacagttggtggtgccggtggcacacatctggtatttccgttcgcttccaaataagatcggttatttgctcggactgccgacaaagaagctggattcgattatatattacgaacgttatgttgttattcagccgggtgtaaaggctgaagatggcattgccgaatatgatttactttctgaagaagaatatctggatattctggatacacttccgaaggacaatcaatatctggaggataatgatccgaataagttcatcgctaagatgggagctgaagcaatctatgatttgctggctcgtttggatctggatgctctgtcttatgaattgcgtcaccgtgcaggcaatgatgcttcacagcaacgtaagaatgaggcattgaaacgtctgcaggttgtagaatcgttccgtgcatcacgtggacgtaacaagccggaatggatgattgtacgtatcgtaccggttattccgcccgaactccgtccattggttccattggatggtggtcgttttgctacttctgacttgaatgacctttatcgtcgtgttatcattcgtaacaaccgtctgaagagactgatcgaaatcaaagctccggaagtaatcttgcgtaatgagaaacgtatgcttcaggaatctgtagactcattgttcgataattcacgtaaatcaagtgcagtgaagacggatgctaaccgtccgttgaaatcactgtctgatagcttgaaaggtaaacaaggacgtttccgtcagaacttgttgggtaaacgtgttgactactctgcacgttcggtaattgttgttggtccggaactgaagatgggtgagtgcggtattcctaaattgatggctgccgaactttataagccgtttattatccgtaagctcattgaacgtggtatcgttaagacagtgaaatctgcaaagaagattgtagatcgtaaggaagcggtgatctgggatattctggaacacgtaatgaaaggacatcctgtactgttgaaccgtgctccgacattgcaccgtttgggtatccaggcattccagccgaagatgatcgaaggtaaagctatccagttgcacccgttggcatgtacggcattcaacgccgacttcgacggtgaccagatggctgttcacttgcctttgagtaacgaagcaattcttgaagctcagatgttgatgcttcagtcacataatatcctgaatccggcaaatggtgcgcctattactgtgcctgcacaggatatggttcttggtttgtattacattaccaagttgcgtgccggtgctaagggagaaggacttacattctacggaccggaagaagcattaatcgcttataatgaaggtaaggtagatattcatgctccggtaaaggtgatcgtgaaagacgttgatgaaaatggtaacattgttgacgttatgcgtgaaacttctgtaggacgtgtgattgttaatgaaattgttcctcctgaagcaggttatatcaatacgattatttctaagaaatctcttcgtgatatcattagtgatgtaatcaaggtttgtggtgtggctaaagctgcagacttcttggatggaatcaagaacttaggttaccaaatggcctttaagggtggtttgtcattcaacttgggtgatattattatcccgaaagaaaaagagacattggtacaaaaaggttacgacgaagttgaacaagtcgtaaacaactataatatgggtttcattaccaacaacgaacgttataatcaggtaattgatatctggacacatgtgaactctgagttgtctaacatcttgatgaaaactatttcttcggatgaccaaggatttaactctgtatacatgatgctggattcgggtgcccgtggttctaaagaacagattcgtcagttgtccggtatgcgtggtttgatggctaagccccagaaagctggtgctgaaggtggtcagattattgaaaacccgatcttgtcaaactttaaagagggactttctgtgttggagtactttatctctactcacggtgcccgtaaaggtttggcggataccgctttgaagactgccgatgccggatatttgactcgtcgtctggtagacgtttctcacgacgtgatcatcacggaagaagactgcggtacacttcgtggattggtttgtacagacttgaagaataacgatgaagtaatcgctaccctgtatgaacgcatcttaggtcgtgtttctgtacatgatattattcatcctactacaggcgaattgcttgttgccggtggtgaagaaatcacagaagaagttgctaagaagattcaggattctccgattgaaagcgttgaaatccgttctgtattgacttgtgaagcgaagaagggtgtttgtgctaagtgttacggacgtaacctggcaacaagccgcatggttcagaagggtgaggctgtcggtgtaattgctgctcagtcaatcggtgagccgggtacacagttgacattgcgtacattccacgccggtggtactgctgcgaatattgcggcaaatgcaagtattgtggctaagaacagtgctcgtctggaatttgaagaacttcgtacggtagatatcgtagacgaaatgggtgaagctgcaaaagtagtggtaggccgtttggctgaagttcgttttgtggacgtaaatactggtatcgttctttctacgcacaatgtaccttatggttctacattatatgtatcggatggtgatctggttgaaaagggtaagttaattgctaaatgggacccgttcaatgccgttattataactgaagcaactggtaagattgaattcgaaggtgtaattgagaatgttacctataaagtggaatcggatgaagcaaccggtcttcgtgaaatcatcattattgaatctaaggataaaacgaaagttccttcggctcatatcctgacagaagacggtgatctgattcgtacttataacttaccggtaggtggtcacgtgattattgaaaatggtcagaaagtgaaagccggtgaagtaatcgtgaagattccgcgtgctgtaggtaaggcgggtgacatcacgggtggtcttcctcgtgttactgagttgtttgaagcacgtaatccgtctaatcctgctgtcgtttctgaaattgacggtgaggttacaatgggtaagatcaagcgtggtaaccgtgaaatcatcgtaacttcgaaaacaggtgaagtgaagaagtatcttgttgcattgtccaaacagattctggttcaggagaacgactatgtgcgtgctggtactccattatctgatggtgctactactccggctgatatcctggcaattaaaggtcctacggctgtacaggaatatattgtgaatgaagttcaggatgtataccgtctgcagggtgtgaagatcaatgataagcattttgagattatcgttcgccagatgatgcgtaaggttcagatcgatgagccgggtgatactcgcttcttggaacaacaggtagtggataagcttgagtttatggaggaaaacgatcgtatctggggtaagaaagtggttgttgatgcaggtgattctcagaatatgcagccgggacagattgtgactgcccgtaagttgcgtgatgagaacagtatgctgaagcgccgtgacttgaaacctgttgaggtacgtgatgctgtagctgcaacttctactcagattcttcagggtattacgcgtgctgcactgcagacttcaagctttatgtcagctgcatccttccaggaaacaacgaaggtgttgaatgaggctgctatcaatggcaagacagataaacttgaaggaatgaaggaaaacgtaatttgcggtcacttaattccggcaggtacaggtcagcgtgaatttgaaaagattatcgttggttcaaaagaagagtatgatcgtatcttggcgaacaagaagacagtacttgattacaatgaagtagaataatacaattcaattgactatatgaaaaaggagcgattgctgtagcaggcagttgctcctttttttgtttcttttacctgactgtatcattcttatctcgataaaattttgttattttgcaaaaaaacattttatcttatttaatatggaagaacaaaataacaaccagttacagatcgagttgaaagaagaagtagcgcaaggaacttatgcgaatcttgcaatcattactcattcaagctctgagtttattctagactttgtacgggttatgccaggagtgccgaaagcaggagtgcaatctcgtattatagtagctccagaacacgcaaaacgcttgttgcgggcattggaggataacatagcaaagtatgaacgtgcttttgggcctattcgtatttctgaagagtcaccgatgcctccgctaagtgttgtaaaaggcgaagcatgaggttgatataaaaacattaaaaaagaaaaaaaagttgtagcgcattgaatattcaaatattattcgtatttttgcagcccaaaatgtatagttacgaaattaatataacaataatataaatcaaaaaacaattaaaatgcctacaattcagcaattagtaagaaaaggacgcgaagtgctggtggagaaaagtaaatctccagccttggattcatgtcctcaaagacgtggcgtttgcgtgagagtatatactactactccgaagaagccgaactctgcaatgcgtaaagtagctcgtgtacgtttgactaaccaaaaagaggttaactcatacattccgggagaaggacacaatttgcaggaacactcaatcgttttggtacgtggcggtcgtgtaaaagaccttcctggtgtacgttaccacattgtacgtggtacacttgatactgcaggtgttgctggtcgtactcaaagacgctctaaatacggagctaagcgtccgaaaccaggacaagctgcgccggctaagaaaaaataaggattaaaacctaattagaattaaagtaataacttacgttttagtttgttggaaatgctaaaggttgagtaaattctccggtgggagagttgaagaagtcaagaagtagacaaccaagaacaaaaacattatttttcaaacaaatgagaaaagcaaaaccaaaaaaacgcgtaatccttccggatcccgtttttaatgaccaaaaggtttctaagtttgtaaaccatttgatgtatgatggtaaaaagaatgcgtcttatgaaatcttttatgccgctctggaaacagtgaaagcaaaacttcctaacgaagaaaaatcagctctcgaaatttggaaaaaggctttggataatgtaactccgcaagtagaagtaaaatctcgtcgtgtaggtggtgctaccttccaggttcctactgaaatccgtcctgatcgtaaagaatcggtttcaatgaaaaacttgattctgtttgctcgcaaaagaggtggtaaatctatggcagacaaattggctgctgaaatcatggatgcctttaacgaacaaggtggtgcatacaaacgtaaagaagatatgcatagaatggctgaagctaaccgtgcatttgcccatttcagattctaatactataagaatataaccgatttagattaaaaacttaaagtaaaggaataagaaaatggcaaagacagatttacatttgactcgtaatatcggtatcatggctcacattgatgccggaaaaacaacaacttctgaacgtatcctgttctacactggattgactcacaaaattggtgaggtacacgatggtgctgcaacaatggactggatggaacaggagcaagaacgtggtattactattacatctgctgcaacaacaacaagatggaaatatgctggtgatacttataaaatcaacttgattgacactccgggacacgttgactttactgctgaagtagaacgttcgttacgtattctggatggtgctgtggctgcttactgtgcagtaggtggtgtagagcctcaatcagaaactgtatggcgtcaagctgataagtataatgtgccacgtattgcgtacgtaaacaaaatggaccgttcgggtgctgacttctttgaggttgtacgccagatgaaagctgttttgggtgctaatccttgtccaatcgttgttcctattggcgctgaggaaaccttcaaaggtctagtagacttgattaaaatgaaagctatctattggcatgatgaaacaatgggggctgactatacagttgaagaaataccggcagatctcgttgatgaagcaaatgaatggagagataaaatgcttgaaaaggtagctgagtttgacgatgctttgatggagaaatatttcgacgatccttctactattacagaagaagaagtgttgagagctcttcgcaatgcaacagttcagatggcagttgtaccaatgttgtgtggctcttcatttaagaataagggtgttcagacattgttggactatgtttgtgctttcttgccttctccattggatactgagaatgtgattggtacaaatccgaatacaggtgcagaagaagatcgtaaaccgagtgatgatgagaaaacatcagctttggcatttaagattgctactgacccttatgtaggtcgtttgactttcttccgtgtatattcgggtaagattgaagctggttcttatatctataattctcgctctggtaagaaagaacgtgtttctcgtctgttccagatgcattcaaacaagcagaatccggttgaagtaatcggtgctggtgatattggtgcaggtgtaggttttaaagatattcatactggtgatacgctttgtgatgaaacagctccgatcgtattagagtctatggacttcccagaaccggtaatcggtattgcagttgagcctaaaactcagaaagacatggataaattgtctaacggtttggctaagctcgctgaagaagatccgacatttacagttaagactgatgagcaaacaggacagactgtaatctctggtatgggtgagttgcacttggatatcattattgaccgtttgaaacgtgaatttaaagtagaatgtaaccaaggtaaacctcaggttaattataaggaagctatcactaagacagttgatcttcgtgaagtttataagaaacagtctggtggtcgtggtaagtttgcagatattattgttaagatcggtcctgttgatgaagatttcaaagaaggcggattgcagtttatcgatgaagtgaagggtggtaatattcctaaagaatttattccttcagttcagaaaggtttcacaagcgcaatgaagaacggtgtgttggccggatatccgttggattcaatgaaagtaactttgattgatggttcattccacccggttgactctgaccagttgtctttcgaaatctgtgctattcaggcatataagaatgcatgtgctaaagcaggtccggtattgatggagcctatcatgaaactggaggttgttactccggaagaaaacatgggtgatgtgatcggtgacttgaataagcgtcgtggccaggttgaaggtatggaatctagccgttccggtgctcgtatcgtgaaagcaatggtgccactggctgaaatgtttggttatgtaacagcgttacgtactattacatcaggtcgcgcaacttcatcaatggtatattctcatcacgctcaagtttctaactctattgctaaggcggtattggaagaagttaaaggacgtgctgatttactctagaagaatatcaaaagcagcaggctagcgaatgactcttagcctgccgctttatcttatttataaatatattaatttaaaaccataatgagtcagaaaattagaattaaattgaaatcttacgaccacaacttggttgacaagtcagctgagaagattgtaagaaccgtaaaggctacgggtgctattgttagtggtccaattcctctgcctacgcacaagcgtatctttacagtaaaccgctcgactttcgttaacaagaagtcacgtgaacagtttgaactctcttcttataagagattgattgacatctatagctcaactgctaagacagtagatgctcttatgaagcttgagttgccgagtggtgtggaagtagaaattaaagtttgataattaaaaattagtgaaatgccaggattattaggaaaaaaaatcggaatgacatccgttttcagtgctgatggtaagaatgtaccatgcactgttatcgaagcaggtccttgtgttgttactcaggttaaaactgtcgaaaaagatggctatgcagctgttcagttgggttttcaggacaaaaaggaaaaacatacaactaaaccgttgatgggtcactttaagagagctggagtaacaccgaagagacacttggccgagttcaaagaatttgagacagagttgaatctgggtgatactattactgtagagatgtttaatgacgctaccttcgtagatgttgtcggaacctctaaaggtaaaggcttccagggtgtagttaagagacatggtttcggtggtgtaggtcaagctactcacggtcagcacaaccgtgctcgtaagccgggttctatcggtgcttgttcttatccagctaaagtattcaaaggaatgcgcatgggcggacagctcggtggtgacagagttactgttcaaaacttgcaggtattaaaagtaatcgcggatcataaccttcttttgatcaaaggttctatcccgggttgcaaaggttcaatcgtaataattgagaaataatggaagttaacgtatataacattaaaggtgaagacactgggagaaaggttacgttaaacgaatctatcttcggaattgagcccaacgaccacgctatctatttggatgtaaagcaatttatggccaaccagcgtcagggtactcataagtcaaaagaaagaagtgaaatcagtggctctactcgtaagatcggtcgccagaaaggtggtggtggagcacgtcgtggtgatatgaattcaccggtgctcgttggtggtgctcgtgtttttggtccgaagccaagagactacttcttcaagttaaataaaaaagttaagacattggctcgtaagtcagcattgtcttataaagttcagaacaacgcgcttattgttgttgaagacttcgtttttgaagctcctaagacaaaagatttcgttgctatgacaaaaaatcttaaagtttccgataaaaagctacttgtaattttaccggaagcaaataaaaacgtatatttgtcagctcgtaacatagagggtgcaaacgtgcagactgtctcaggattaaatacttacagagtattgaatgctggggttgttgtgcttacagaaaactctctgaaggctattgacaatatcttaatttaaaaaggaggcttaaataatgggaattattattaaaccgttggtaacagagaaaatgactgcaatcactgataagctgaatcgttttggctttgttgtacgtcctgatgctaacaaactggaaattaagaaggaagttgaagctctttataatgttactgtagttgatgtgaatacagtgaagtatgcaggcaaaaataaaagccgttatactaaagcaggtatcatcaatggacgtacgaatgcattcaaaaaagcaatcgtaacattgaaagaaggagatactattgatttttatagtaatatttaataaaaatggcagtacgtaaattaaagcccacaacaccggggcaaagacataaaattattggtactttcgaagaaattactgcatcagtaccagaaaagtctcttgtatatggtaagaaatcatctggtggtcgtaacaacgaaggtaagatgactatgcgctacattggtggcggtcatagaaaggtgattagaattgttgatttcaagagaaacaaagacggtgtaccagcagtggttaagacaattgaatacgatccgaatcgttcggctcgtatcgctttgttatattacgctgatggagaaaaaagatatattattgctcccaatggattgcaagttggtgcgactctgatgtcgggtgaaacagcagcgccagagattggtaatactcttccccttcagaacattccggttggtactgtaattcacaatattgagttacgtccgggacagggtgctgctctggttagatcagctggaaactttgctcagttaacttctcgtgagggtaagtattgtgtgattaaattgccttcaggtgaagtaagacagattcttagcacttgtaaagctactatcggtagtgttggtaactcagatcatggattggaacgctcaggtaaggctggacgctctcgttggcaaggtcgtcgtcctcgtaaccgtggtgttgtaatgaacccggttgatcacccgatgggtggtggtgaaggacgttcttccggaggacatccaagatctcgtaagggattgtacgctaagggacttaagactagagctcctaagaaacaatcgtctaagtacattattgagagaagaaaaaagtaatctgattaattgagtaaactatgagtcgttcattaaaaaaaggtccatatattaacgtaaagcttgaaaagagaatttttgccatgaatgaatctggcaaaaaagtcgtagtaaagacatgggccagagcttcaatgatttcgcctgattttgtaggccatacagttgcagttcacaatggaaataaatttattcctgtatatgttaccgaaaatatggtaggacacaagttgggcgaatttgctccaactcgtacattcagaggacacgctggtaacaagaaaagataacaggaattatttgaaataataaagtaataaatataatgggagcaagaaaaaaaatatcggctgaaaaaagaaaagaagcccttaagaccatgtattttgctaaattgcaaaatgttcctacttctccacgtaagatgcgcttagtcgctgatatgattcgtggtatggaagtgaacagagcacttggtgttttgaaattttcttcaaaagaagctgctgcaagagtggaaaaattgcttcgctctgcaattgctaactgggaacagaaaaacgaacgtaaagcagaaagcggcgagttgttcgtaacgcagatttttgttgatggtggcgctacactcaaaagaatgagaccggcaccgcagggtagaggttatagaattcgcaaacgttcaaatcacgtaacattgttcgttggtgctaaaagtaataacgaagatcaaaattaaggtagatgggacaaaaagttaatccaataagcaaccgtttaggaattatcagaggatgggattctaactggtatggtggaaatgattacggtgattctttgctggaagatagcaaaatccgtaaatatcttaatgcaagacttgcaaaggcaagtgtatcaagaatcgtaattgaacgtacgctgaagctcgttactattactgtttgcactgctcgcccgggtattatcatcggtaaaggtggccaagaagttgataagttaaaagaagagttgaagaaggttaccgacaaagatattcagattaatatctttgaagtgaaaagaccggaactggatgctgtaattgttgctaacaacattgctcgccaggtagaaggtaaaattgcctaccgccgtgccattaaaatggctatcgcaaatacaatgcgtatgggtgctgaaggtatcaaaattcagatttcaggacgtttgaatggagctgaaatggctcgttctgaaatgtataaagaaggaagaactccgttgcacactttcagagctgatatcgactactgtcatgctgaagcattgactaaagtgggtcttttaggtatcaaagtttggatttgtagaggtgaagtgtttggtaagaaagaattagctccgaactttacacaaagcaaagaaagtggtcgtggaaacaatggtggaaacaacggcggaaagaacttcaaaagaaagaaaaataatcgctaaacgaatttgaattttaggaaactatgttacaaccgaaaaagacaaaattcagaagacaacaaaaaggccgtgcaaaaggtaatgcccagagaggtaaccagctggctttcggttcttttggcattaaggctttggaaactaaatggattacaggccgtcagatcgaagctgctcgtattgcagtaacaagatatatgcaacgtcaaggacagatctggatccgtatattcccggataaaccaattactagaaaacctgccgatgtgcgtatgggtaaaggtaaaggtgctcccgagggatttgtggctcctgtaactccaggtagaatcattattgaagctgaaggagtatcttacgaaatcgcgaaagaagcattgcgcttagctgctcaaaagcttcctattacaacgaagtttgtcgtaagacgtgattatgatattcaaaatcaaaatgcgtaaggtttatgaaaattgcagaaattaaagaaatgactactaatgatttagtagaaagagtagaggcagaaacagctaattataaccagatggttatcaatcattctatttctcctttggaaaatcctgctcaaatcaaacaattacgcaggactattgcgcgtatgaaaacagaattacgccaaagagaacttaacaataaatgatcagcttgatggaagcaagaaatttaagaaaagaaagaacaggggttgtattgagcaacaagatggaaaaaactatcacagttgctgccaagtttaaagaaaaacaccctatatatggtaagttcgttagtaaaacgaagaagtaccatgctcatgatgaaaagaatgaatgcaatatcggtgatactgtacgcatcatggaaactcgtcctttgagcaagactaaaagatggagattagtagaaataattgaaagagctaagtaattatgatacaagtagaatccagacttacagtatgtgataacagtggagctaaagaagctttgtgtatccgtgtattgggtggcacaggtcgtcgttacgcttcagtaggagatgttattgtagtttccgtaaagagtgttatcccttcgagtgatgttaaaaaaggtgcagtatcaaaggctttgattgtacgtacgaagaaagaaatccgtcgtcctgatggttcttatatacgttttgatgataatgcttgcgtgttgcttaataatgcaggtgaaattagaggaagtcgtattttcggtcctgtagcaagagaacttcgtgctacaaacatgaaggttgtgtcacttgcgcctgaggtactttaattttgtaaaagatttgagtaatgagtaaattacatattaaaaaaggcgatacagtttacgtaaatgctggcgaagataagggcaaaactggtcgtgtattgaaggttcttgttaaagaaggtcgtgcaattgttgagggtatcaatatggtatctaagagcactaagccgaatgcaaagaatccgcagggtggtattgtgaagcaagaagcttctatccacatttcaaacttgaacccggttgatccaaaaactggtaaagcaacgcgtattgggagaagaaagagttctgaaggaactttagtgcgttattctaaaaaatcaggagaggagatttagtaatgagtaatactgctagcctaaagaaagaatatgcagatcgtattgcacctgcattgaaatcacaattccagtattcttcaacgatgcaggtacccgtacttaagaagattgttatcaatcaaggtttaggtatggctgttgctgataagaagattattgaagtagcaatcaatgaaatgacagctatcacaggtcagaaggccgtagctaccatttctcgtaaagatatcgcaaactttaagttacgtaaaaaaatgccgattggcgttatggtaactttgcgccgtgagagaatgtatgaattcttggaaaaactagttcgtgtagctcttcctcgtattcgtgacttcaaaggtatcgaaagtaagtttgatggtaaaggtaactatacccttggtattcaggaacaaatcattttccctgaaataaatatcgatagtattacaagaattctcggaatgaatattacctttgtaacctctgcggagacagatgaagaaggttatgccttgttgaaggaattcggtttaccttttaaaaacgctaaaaaagattaatagaatatggcaaaggaatcaatgaaggcacgtgaagtaaagcgtgctaaattagtagccagatacgccgagaaaagagccgctttgaagcaaatcgtgagaacaggtgaacctgccgatgcttttgaagctgcacagaaattgcaagagttgcctaagaattcaaatccaattcgtatgcacaaccgttgcaaactgactggtcgtccaaaaggttatatccgtcagttcggaatttcaagaatccagttccgtgagatggcatctaacggtctgatcccgggcgtaaagaaagcaagctggtaattattgtttaaatattgtcagggaagtcctgattaatttaatttatttttatatgactgatccaatagcagattatttgacgaggttgcggaacgcaattggtgctaagcacagagttgtagaagttcccgcttcgaacttgaaaaaagaaatcactaagattctttttgaaaaaggctacattcttaactataagtttgtagaagatggtcctcaaggaactatcaaggttgccttgaagtatgattctgttaacaaagttaacgcaatcaaaaaattagaaagagtatcttctccgggtatgcgtaagtatactggttacaaagatatgccgcgtgttattaatgggctgggtattgctataatatctacttccaaaggtgtaatgactaacaaagaagctgctgaactgaaaatcggtggtgaagtcttgtgttacgtatattaatttaggaggaataagcaatgtcaagaataggaaaattacccattagtatccctgctggagtgacagtcactctgaaggatgatgtggttaccgttaagggacccaaaggcgaacttagccaatatgtgaatcctgctatcaatgttgccattgaagacggacacgtgactttaacagaaaacgaaaaagaaatgattgataacccgaagcaaaagcatgctttccacggtttgtatcgttctttagttcataacatggttgtgggcgtgtctgaaggatataaaaaggaactggaacttgtcggtgtaggttaccgtgcttctaaccaaggtaacatcattgaactggctttaggttatacacacaatattttcattcaattgcctgctgaggtgaaagttgaaactaagtctgaaagaaataagaatcctcttattatattggaatcgtgtgacaaacaattgcttggtcaagtttgctctaaaatacgttctttccgtaaacctgaaccatataagggtaaaggtattaagtttgttggcgaagtaattcgtagaaagtctggtaaatcagccggcgctaagtaaatcatataaaattagattattatgacaacaaaaatagaaagacgagttaagatcaaatatagagtacgcaataagatttcaggtactgctgaacgtccgcgtatgagtgtatttagaagtaacaagcaaatttatgtccagattatcgatgatctttctggtaagacactggctgctgcttcttctttaggtatggctgagaaagtcgcaaagaaagaacaagctgctaaagttggtgaaatgattgctaaaaaggctcaggaagcaggtataactactgttgttttcgaccgtaatggttacttgtatcatgggagagtaaaagaagtagctgatgctgctcgtaacggtggacttaaattttaatcattatggcaggagttaataatagagttaaggttactaacgatatagaactgaaggatagattggttgctattaatcgtgttactaaagttaccaaaggtggtagaacttttagtttctctgcaatcgttgttgtaggtaacgaagaaggtattatcggttggggacttggtaaagcaggtgaagtaacagctgctatcgctaaaggcgtagaatcagctaaaaagaacctggtgaaagtacctgttttgaaaggtactgttcctcatgaacaatcagctaagtttggtggtgctgaagtattcatcaaacctgcatctcacggaaccggtgtagtagctggtggtgctatgcgtgctgtattggaaagtgttggtattactgacgttttggcaaaatctaaaggttcttcaaatccgcacaaccttgttaaagctacaattgaagctttgagtgagatgcgtgatgcaagaatgattgctcagaacagaggtattagtgttgaaaaagtatttagaggataaggaggagatatgtcaactataaagattaaacaagttaaaagtagaattggtgctccagctgatcagaaaagaactcttgatgcactgggacttcgcaaactgaaccgtgtggttgaacacgaaagcactccttcaattcttggaatggtagataaagtaaaacacttggttgccattgttaagtaattatttgttgaataaaaaaacgaattacaatatgaacttaagtaatttaaaacctgcagaaggatctactaagacaagaaagagaataggacgtggtgccggttctggtttgggtggtacttctacaagaggtcataaaggagctaaatcaagatctggatactctaagaaagttggctttgaaggtggtcagatgcctcttcaacgtcgagtacctaaatttggttttaagaatatcaatcgtgtagaatataaggctatcaacttggatacaattcagacgcttgcagatgctaagaatctgacaaaagttggtattagcgactttattgaagcaggatttatttcttcaaatcaattggttaaagtattgggtaacggagctctgactaacaagctggaagtagaagctaacgcattctctaagagtgctgctgctgctattgaagctgctggtggaactgtagtaaaactctgattcaatgagaaaagctattgaaacattaaagaatatatggaagattgaggatctgagacagcggatcctcatcaccatattgtttgtggcaatttaccgtttcggatcatatgtcgtattaccgggtattaatccggcaatgctggcaaaattgcacgaacaaacaagtgaaggccttttagccttgttaaatatgttctctggaggagcattttctaatgcctctatttttgcattaggaatcatgccttatatctctgcatctatcgttattcagctattgggaatcgctgtgccgtatttccaaaagttgcagcgcgaaggtgagagcggcagaagaaaaatgaatcaatatactcgttatctgacgattgctatattgttagttcaggccccttcttatttgctcaatcttaaaatgcaggctggcccttccttaaatgcttcattagattggactctgtttatggttacctctaccattattttggcagcaggtagtatgtttattttgtggcttggtgaaagaataactgataaaggtattggtaacggtatttcatttatcatcctgatcggtattatcgctcgtttccctgatgctttgatacaagaagttgtatccagagtagcaaataagagtggtggtctgattatgtttataattgaagtcgtattcttattgttagtgattggtgctgcaatcttgttggtacaaggtacaagaaagattcctgtacaatatgctaaaagaatcgtaggtaataaacaatatggtggtgcaagacagtatattcctttgaaggtgaatgctgctggtgtaatgcctataatctttgctcaggcaatcatgtttattccaattacatttatcggtttttccaataatgtaaataacgcaggtggtttcttgcatgcgtttacagatcatacaagtttctggtataattttgtttttgcggtaatgattatattatttacatatttctatactgcaattacaatcaatccgactcagatggctgaggatatgaagagaaataatggtttcatccctggtatcaaaccgggaaagaaaacagcagagtatattgatgatatcatgtctcgtattactttaccgggttctttcttcttggcattggttgctattatgcctgcttttgctggtatatttggggttcaagctggatttgctcaattcttcggcggtacatctttgttaattcttgtaggtgttgttcttgatacactgcaacaggttgaaagtcatttgttgatgagacattatgatggtctgttgaaatcaggtcgtattaagggacgcgctggtgtagcggcatattaattctttagaatagaaatgatatttcttaagacagaagatgaaatagaattgctccgtcagagtaacctgcttgtcggtagaactctagctgaggttgccaaagtggtgaagcctggtgtaactacacgtgagttggataaagttgctgaagaattcattagagataatggggcaactccaacttttaaaggattcccgaatcaatatggagacccgtttcctgcatccatctgtacttctgtaaatgagcaggtagtacatggaatcccgggggatattgttctgaaagacggcgatatcgtatctgtggattgcggaacttatatgaatggtttttgtggagattctgcttatactttttgtgtaggagaggtagacgaagaaattcgtaccttgttgaaggtaactaaagaagcgttatatatcggtattcagaatgcagtacatggaaaaagaatcggagatatcggatatgctattcagcaatattgtgagtctcattcttatggtgtagtgcgtgagtttgtcggtcacggcatcggtaaggaaatgcacgaagatccccaggtacctaattatggtaaaagaggatatggtcctttgatgaaaagaggtctttgcattgcaattgagccgatgataacgttgggagacagacaagtgattatggaaggtgacggatggactgtgaggaccagagatcgtaaatgtgctgcgcactttgagcatacggtagctgttggagctggtgaggctgatattttgtcttcattcaaattcatagaagaagttttaggagataaagcaatataatatggcaaagcaatctgcaatagaacaagatggagttatagttgaagcattgtctaatgcaatgtttcgtgttgaattagaaaacggacatgagattactgcacatatttcaggtaagatgcgtatgcattacatcaagatcttgccgggagataaagtgagagtcgaaatgtctccttacgacttatcgaaaggaagaattgtgtttagatataaataaaattaagatatgaaagtaagagcatcattaaagaaacgcacgccagaatgtaagatcgttagacgtaatggccgtttgtatgttattaacaagaaaaatcctaagtataaacaacgtcaaggataatttgttatttttgcaaaaaaaataatttagtatatggctataagaatagttggtgtagatttacctcagaataaaagaggtgaaattgcgttgacctatgtatatggaataggtcgcagtagttcagcaaaaattttagataaagctggtgtagataaagatctgaaggttaaagactggacagatgatcaagctgctaagattcgtgagattatcggtgcagagtataaagtagaaggtgatcttcgttctgaaatccaattgaacattaagcgattaatggatattggttgttaccgtggtgtacgtcatcgtattggtctgccggttagaggtcagagcactaagaacaatgcacgtactcgtaagggtagaaagaaaaccgttgctaataagaaaaaagctactaaataataattgttgatatggcaaaaaaaacagttgcagctaagaagagaaatgtgaaagtagacgctaatggacagttacacgttcattcatctttcaacaatattattgtttctcttgcaaacagtgaagggcagattatctcttggtcatctgcaggaaagatgggatttagaggttcaaaaaagaatactccttatgcagctcagatggctgcccaggattgtgcaaaaattgcatttgatcttggcctgagaaaggtaaaagcatatgtgaagggtccaggtaacggacgtgagtctgctattagaactatccacggagctggtattgaggttacagagatcatcgacgtaactccgcttccacacaatggttgtcgtcctccgaaaagacgtagagtttaatttacctttaacttaaaatgatcttgattttgtttttggattgcaataatttcttctctgcaatcgcggctgcaacaaattgagttcatgaataaacaattaaatatttaaaagaaatggctagatatactggaccaaaatcaagaatagcccgtaaattcggtgaaggcatctttggagctgataaagttttgtcaaagaagaactatcctcccggacaacacggaaattcaagaaaaagaaaaacttctgaatatggtgtgcaacttcgtgaaaagcagaaagcgaaatacacttatggagttttagaaaaacaattccgcaatttgtttgaaaaagccgctaccgctaaaggtattaccggtgaggtgcttcttcaattgctggaaggccgtcttgacaacgtagtattccgtttgggtattgctcctacacgtgctgctgctcgtcagttggttagtcacaagcatattactgtagatggtgaagtggtaaacattccttcattcgcagtaaaaccaggacaattgattggtgttcgtgaaagatctaaatctttggaagtaattgctaactctcttgcaggtttcaatcacagcaaatacgcttggttggagtgggatgaaacttctaaggtcggtaaaatgttgcatatacctgaaagagcagacattcctgagaacattaaagaacatttgatcgttgaattgtattctaaataataattaatttcatggcgatattagcatttcaaaaacctgataaagtattaatgttggaggcggactccagattcggtaaattcgaatttcgtccgttggaaccggggtttggtattaccgtaggtaatgcattacgccgtatcctgctctcttcattagagggttttgctatcactactatcagaatagatggtgtggagcatgaattttctagtgtacctggagtaaaagaggatgttaccaacattatcttgaatctgaaacaagtgagattcaagcaagtagttgaagaattcgagagcgaaaaagtgagcatcactgtcgagaattcaagtgaatttaaagcaggtgacataggtaagtatttgactggatttgaagtgttaaatccggaattagttatttgtcatttagattctaaggcaactatgcagattgatattactattaacaagggtcgtggatatgttcctgctgatgaaaatcgcgaatattgcacggatgttaatgtaattccaatcgactctatttatacaccgatacgtaatgtcaagtatgctgtagaaaacttccgtgtagaacagaagactgactacgaaaagctagtgcttgagattagtaccgacggttctatacacccgaaggaagcgctgaaagaagctgcaaaaattctgatctatcacttcatgttgttctctgatgagaagatcacgcttgaaagtaacgatactgatggcaatgaagagtttgacgaagaagtattgcatatgcgtcagctgttgaagactaagcttgttgatatggacttgtcagttcgtgccctcaactgtttgaaggctgctgatgtagaaactctcggcgacttggtacaattcaacaaaactgacctgttgaagttcagaaacttcggaaagaaatcgcttaccgagcttgatgatttgctggaaagtctgaatctatcgtttggaaccgacatttctaaatataaattagataaagaataaaaaatgagacataataaaaaattcaatcatttaggtcgtactgcttctcacagaagcgctatgttatctaacatggcttgctccttgatcaagcacaaaagaatcactacgactgtggcaaaggcaaaagctttgaagaagtttgttgagcctttgattacaaagtctaaagaagatactacgaattctcgtcgtgttgtatttagcaacctgcaagataagattgcagtaacagaattgttcaaagaaatctcggttaagattgctgaccgtccgggtggttatactcgtatcatcaagactggtaaccgtttaggtgacaatgcagaaatgtgtttcattgagttggtagactacaatgaaaacatggctaaagaaaaagttgctaagaaagctactcgtactcgtcgttctaagaagagtgccgaagctgctgctcctgctgctgttgaagctcctgcaactgaagaaccaaaagctgaatcagctgaataattttacagttattcttatacatataaaaaaggctactcatacgggtagccttttttgtatccttatattttagttatcctaagatacattaaaagatttaccgaatgaacttttcataagaattatctgttatatttgcaggagaatatggcaaaatttgtaaaggtaatattgtttctgttgctggcagttgcccttcatggggtcgcaggcaatgttttcaccgaaaaacaggtggaacagccagagcatgctgttacatattctatgagaccgcaagggcagatcaatgctcctgaatctccttatcttcctgtggctgaattaaccaatttgcaaagccatcagatatcggtgacacgtatccagcgtgtgcaaatcggtgaatacttctcttctttgagaaatgtgctgcaatgttgtgcagatcgtgataactcactgtcacagcattggggaaggatttataatactacaacttcctattattgccagcctgcaagtgaatactatgtatttactttaaggcatattattatttagacgtttatttattggtattattttctggattgctggcgttaattatatagtgccggtcagtctttattatcttcatatttttactaataatttaaacttcaatattatggcaactcaagctattgatgctactatatttgcatcttcacatcccgatatcgctaaacgtacgagtatctccggtcttttaatttcttgtgtaatgttactgattggtattttatcttttgcttctacttttgaactggaagataaatcgtctactgtcagtatggctctgatggtctttgggacaggattgttccttttaggtattttccggcttttttggaagtcaaaggaagtagtctatgtaccgacaggaagcattgcgaaggaacgtagtattttctttgatctgaagcatatggacaagctgactgatcttgttaattccggttcattttctgcggattcaaagattaagagtgaggcaagtggtaatatacgtatggacgtgatactatctgctgataataaatttgcagctgtacagctattccagtttgtaccttatacatatcagccggtgactgctgtgcattattttaccaatgatgcagctgcagctgttgctgcgtttctgactaaaagtcaattgaattaaaggtgcttaatgtcaaatggtattcatgttgatggcggactgtcatccatcagaagaccatttctaagatcgtgaagtgcgggaatgcagggataaatggataatggattgataattactgaatatcgcacttctatgtcttaatagcttagatacaagcaggctttaaggaataactgacatatggggattaaccgtcgatgacggcaatccccatttttttcattaagaagcacgcattcatgttctgtgcgactccgcttctcatctggtatgagaatgtcagttcgttgttggtaatgtccgcttcgaaacaataattccggatattttgtggaaaagcatctattagtgtgcctaacagcaagtcatgagtagcgataatgccattggcgtccatgctcataaattgtttgatcaaggcaaaagaacctttctgtttgtccatcgagttagttcctttcaggatttcatcaaggatgataaataaatcttctccggctttgagcttatcaatgattagttttagtcgtttgagttcggcaaagaagtaagattcgttgtcggtgagtgaatcacttgtccggaggctggtgacaagacgagcgggaaatatttccattttcgcagcccatacaggagcaccgatgcaagctaagagatagttaacacctacggtgcgcaggtaagtacttttgcctgccatgttggcgccggtaataatgataaagaacggacgtttctccatatcgattccattgcggacacatttattgcggtccatgagcggatgccctaaggattcggcttgcaggtggaaagattgagaagttatttgaggatagatgtaatccggatggttgtatgagaatgttgcaagagaacaataagcatcgattgctccgatagcttcaatccagcgggggaggtctgcggagtgtgcttctttccatttctcgatttgcatgacctggcggagttcccaaaataagaggccgtttaagatggtgctcattagcaggttgcctcgttggtcaagtgcattcatgagtttagccaggcggtgtacggactgggaagctgtttgattttggcttgtaagttcggctttcagttgttgcagtgcagggctgtgcatctcttttttctcggtgatgagaatctggtcggcgtaagtagacagaatttgtagtttttcgccatacgtcgcttgtattttggttattccttttgagaagataaaactgaatacgacaaagcacgcaaatactatcccactgatgcttgcagggagaaatcccagaatcgttgcgccaatacacaggaggttgataatacctactgctgtcgggaggatacggaggaaagcgtgtttccgatagtcgctcggactgtttacccattctttaatttcagaggtgtcggatggcttgcctttataaagtaatccgagcaggcggaattgttgccgaaactcaagttctgaggatagttcccgaatcgcttcctgacgttgttcgatagcttccttttcttccagatgcgcattgaaccagttggcaagacgctgtttgccaatgggggttgaagtacggttgatatactggaatagcgagtgctcgccaaatatgtccaagtcgaaagtatagaggtgagacggatcgatgtattcctttccgttgtcgaagtcggaaaagtcatattgcagtgctcgtagttcctgctgattgatttctattttctttttgagataatctttccggtaaaaccatcggttgtggctttgcaccagccaaatgaaagcgatgatgggaagtacggtaagtacgatgagttttaaccatccatcggaccaaaaaataacggcggaggctactgcttctacgaataagatcagtctcagaaggctgatatagcgaatgcgtttccgcgctttttgtagttgttgttctgtttcctgaatgatctgttgataggttgctataatattttcttgtttttccatacgattatattgcttttcggacaaaggtaatataattcgtaaaaggctgaatgggagcgtgtttttgtaaagagcagatttactctttattaacggtcattcagtaatcggtgatgaagtaagttgtgatggtttagagcaaagttacataggaaataaacacactttgttattgtcacttgtcacctttgtgtgataagtgtcttataattagttaagtaatggtgataatagccggtgataataaggtgataatagatttttttctgctttctattatcacctgtttttaatagataatacgattaatttgctgattatcagtggtgagtgtactgttttaaagcctttgcctatttatgttaaaaactcccttttaggcatggatgtacgttgtttatgccatatattacttcctgtatgccgcctatattaagacaagactcggcaaccttaacctgcaaacaaggtttggctaatatattttgtccgtttcatattttcgtttcacgtccgtgatctgttcggttcacgtatgtgagcccaatagtttacgtacgtggactgatgggagcatgtacgtgaaacgatttattgttactgacggaatatattaatcatgcctgcatgatagcataatgaatcgttcatttgctgttgttcctaggtgcttatctttcctttgcccggataaacattgtcacaaacttaaacggatatggatggaacctgttttcatgtaaattgtcacaacttatttcttatgattacttatgtatgttacatcagtatgaatcacagttcaggtcataatatcggtcataacaagtattaatacctgacttctcaatcattaatagttgatatgtcagatattaatatctgacgactcaggtattaacatttgatataccagataaaacacctgatattccggatgaaaaaagacaagataagattataaaaagaaccataaaccgtatctcatgaataaacaaacttcgggtgcgattgccttgcttccgagataattgcgtgtaagaggtgctgtgccaagaaggcgaaagggcttcctggcttcttttttcaacatttctttttccattcttgcatttatgcgctaaaatttataactttccactcgaaaaggcgttgaatgaagaaaggaggatggcttatgaagaaaggatatattttgtggttgctgataagcgtgattagccttccggtagttgcgcagaatatcatttattcaaacttgaaagagttgatggttcaagatggcgatacccttgcagtgttgcgagtagagaagcgttccagaagccagattctattgacaggcggggctgactaccggataacggcaggcaatgatgaatctatgtgccgccagttgaagaagcgttgttttgcggtgcgtacttctgaaggagacttatttatcaactgtcgtaagttgcgttataaaaagatgcgtttcggggcgtggtatgctccggctgttcagttgggcaaaaatatctatttctgtgcgatgccattagggtcggtaatcggtgggacatttgcagaagaagatgatgtgaaactgggcggaaatgtgggagatgctcttgctgcttcaagtctggttactaaacgggtctgctatgagctgaacggtgagaccggaaagattgattttgtaggaaaagaaaagatggcgcaactgctggaaaaacatccggaatggaaaaaagcctaccttacaaaagacagtcaggaagcgaagcataccttcaagtatctgcaaatgctgtgtggtgagcagcagaaagaataaataatacctttctgataataaatctaccaaaacctttgtcttttctcttctttttttctatattgcgaagagttatagaactgtattgcttacagtttgtaatccttaattctgcttattatgaagataactcttggcaacacgttacctccctacccagctttcatagaaggtatccggagggcccccgaccgtagttatacgcttacgccggcgcagacagctacggcattgaagaatgcattgcgctatatccccttggaattgcatgagcaactggcacctgaatttatggaagaattgcgtacccgtgggcgaatttacggataccgcttccgtcccgcaggcgatctgaaagcaagggcaattgatgaatatcgtggcaaatgtgtggaaggcaaagcctttcaagttatgattgacaacaatctctgttttgatatcgcgttgtatccctatgaacttgtaacttatggtgaaaccggccaagtttgtcagaactggatgcaatacctcctgatcaagcaatatctcgaagaacttactcctgagcaaacactggtcattgagtccggacatccgttgggactgtttcgttcccgtcccgatgctccccgcgttattattaccaactctatgatgataggccagttcgacaatcagcacgattggcacattgccgcacaaatgggagttgccaactatgggcagatgacggcgggcggctggatgtatatcggtccgcagggtattgttcatggcactttcaacacattactcaacgccgggcgattgaaactcggcattccgcaggacaaagatttgcgtggtcacctcttcgtatcttccggtttgggaggaatgagcggggcacagccaaaggcagccgaaatagccggagcagcctctattatagccgaagtcgatagctcccgtatcgaaacacgttatcggcagggatgggtaggccatgtcacacaggacctgtcggaagctttccgcctggcaaaagaagcgatggaacgtcgggaaccttgctcgatagcctatcatggcaacgtcgttgatttgctggaatatgcggaacgcgagcagattcatattgaacttttgtccgatcaaacctcttgtcatgccgtttacgaaggaggctactgtcccgcaggcttgactttcgatgagcggacccgccttcttcatgaatctcctgatcagttccgtcgtctggcagacgcttctttgcgccgccattttgaggtaatccggaaactggtggcatgcggcacttacttcttcgattatggcaactcctttatgaaagcgatttatgatgccggagtgaaagagatttcccgcaatggagttgatgagaaagacggatttatatggccgagttatgtagaagatatcatgggaccccaactctttgattatggctatggccccttccgatgggtatgtctgagcggtaggcacgaagatctgataaaaacggaccgtgccgcaatggagtgcattgatgtcaatcgccggggacaggatctggataattataactggatacgcgacgccgaaaagaacaggctggtagtaggtactcaggcacgtattctctatcaggatgccgtaggaagaatgaatatcgccctccgtttcaatgaaatggtacggcggggagaagtaggaccgatcatgttgggccgcgatcatcatgatgtgagtggaaccgattcgcctttccgtgagacatcgaatatcaaagacggaagtaatgtcatggctgatatggccgtgcagtgtttcgccggaaactgcgcgcgtggcatgagcttggtagccctgcataatggcggcggagtcggtatcggaaaagcgattaatggcggcttcggcatggtatgtgacggcagcgaacgggtagacgagatacttcgctcggctatgctttgggatgtgatgggcggagtggcccgccgttcgtgggcccgcaatctgcatgcaatggaaactagtgacgctttcaatgaatcacattcggaagggtatcatataacgatgccttatctggctgatgacgagctgattaaaaagacaataaaagaagcattgtaatagaaagtaacgaaatagagaaataaatatgaattggagtaagatcatcgaatgtgtccccaactttagcgagggacgtgatttggagaaaatagacaagatagtagccccttttcgtggcaaatccggcgtgaagctgctcgattatagcaatgatgaagatcataaccgtctggtagtcactttggttggcgaaccggaagccttgcgcgatgcagtcattgaagctatcggcattgctgtccgtctgatagaccttaatcatcatagcggacagcatccccgcatgggagcggtggatgtggttcctttcattccgatcaagaatacgacgatggaagaagccgtcgccctgtcgaaagaagtggcttcccgggtggcggaactatataatctcccagtctttctgtatgaaaagtccgccacagctccgcatcgggaaaatctggcctccgtccgtaagggagaatttgaaggaatggcggagaaaatcagacttcccgaatggcagcccgacttcggtcctgccgagcgtcatcccactgccggaacggtagctatcggtgcccgaatgccgctggttgcttataacatcaatctgagtaccaataatcttgaaatagccacgaagatagcaaagaatatccggcatatcaacggcggtctccgctacgtcaaagcaatgggggtggaactgaaagagcggaatatcacccaagtatccattaatatgaccgattacacccgcaccgccctttaccgtgctttcgaattggtgcgtattgaggcccgccgctatggagtgacgattgttggaagtgagatcattggtctggtgccgatggaagcgctgatagatacggcctcctattatttaggactggagaatttctccatgcagcaggtgctggaagcgcgtatcatggaatagcgcccggagtattaaaataatgtgcgtccgatataaagctgctgaaacttatatcgaattatgattgaaatagtaagaaccgaataataaaagatcaatgagtgaaaacctgattatattcaatgcccgtattgtcaccccgacaggaatctccgcccgtaaaggtgcggaaatgagacaactccgcatcatagaaaacggaacggtagaagtgaccaaaggcatcatcacttacgtcggcgagagtcgtggcgaagatcgtgacggctactaccagcattactggcattacaacgcccggggacattgcctgcttccgggctttgtcgattcgcatacccattttgtttttggcggagaacgttccgaagaattttcatggcggctgaaaggcgaaagctatatgtccatcatggaacgtggcggagggatagccagtaccgtaaaagctacccggcaaatgaatttcctgaaacttcgctcggcagccgaaggctttctgaagaagatgagtgctatgggagtcaccacggtagaaggtaaaagcggttatggactcgatcgggaaacagagctgctgcaactgaaaataatgcgcagcctgaacaatgacgagcacaaacgtatcgacattgtatccactttcttaggagcccacgcccttcccgaagagtataaaggaagaggagacgaatacatcgactttctgattcgtgaaatgctccccgttatccgcgagaacgaacttgccgaatgttgtgatgtcttttgcgaacaaggagttttctctgtcgaacagtcccgccgcctccttcaggcagccaaagaacaaggcttcctgttaaagctccatgccgatgaaatcgtttcctttggtggcgctgagctggctgccgaactgggcgctttgtctgccgatcatctgcttcaggcttccgatgccggaatccgtgcaatggccgacgcaggagtagtagctaccctgctgcctctgacggctttcgcactgaaagaaccttatgcacgcggtcgtgaaatgattgatgccggctgtgccgtggcacttgccacagacttgaatccgggaagctgtttctccggttccatcccgttgaccattgctttggcgtgtatttacatgaaacttagcatcgaagaaaccatcactgcccttacactgaacggagctgctgcccttcatcgggcagaccggatcggaagtatcgaagtaggcaagcaaggtgactttgtcatactgaattcggacaattatcacattctgccatactacgtaggcatgaactgtgtcatcatgactattaaaggcggtatgttataccccgtcaattgataactaaaagcataaaataccatgttagcagatttaaccgtaaaagatttcttagataaggtagccggcaatgatccggtacccggcggtggcagtattgccgctttaggtggagcgctggcttccgctttggccacgatggtgacaggactcaccatcggcaagaaaggatatgaagccagcgaagaagtaatgcagcacgcacagacgcttaccacccgattccaaaaagaattcatcgccttgattgataaagactccgaagcctatgatgaagtttttgcctgttttaaacttcccaaagctaccgatgaagaaaaagctgcccgcagcgctgccattcaggaagccaccaggcatgccgccctcattccgatggaagttgcccgaaaagcacttgaagtgatgcccgtcatagcagacatcgcccgtctgggaaaccggaacgctattacagacgcctgtgtagccatgatggcggcacgatccgccgtattgggggcattgctgaatgtccgcattaatctgggggtactcaaagacaaagaatttgtccagggcttgcaagccgaagcggaccggatagagcaaaccgcttgccggaaagagaaagaattactggatgccgtcaaccaagatttacgcgtatgagcaagaatgtgtatcaaataggttccggagaactgaccttcgaaatcatcgaacggatcatcaacgagaatctgaagctggaactggctcccgaagccaagctccgcattcagaaatgccgtgattatctcgaccataaaatagcttcttccgaagaacctctttatggcatcaccaccggcttcggctcgttatgcactaaaaatatatctcccggcgaattgggaaccttgcaggaaaacctgataaagagccatgcctgcagtgtaggcgaagaaatccgtcctgtcatcatcaaactgatgatgttgctcaaagcccacgccctctccttgggacatagcggcgtgcaactaatcaccgtgcagcgtatcctcgactttttcaataacgacgtactgcccatcgtctatgaccgcggttctttgggagcttccggcgatctcgctccattagccaatctgttccttcctttgatcggtgtgggcgacgtcaactataaaggaaagaaatgcgaagcaatcagcgtgctcgacgaatttggctgggaacccgtccggctcatgagcaaggaagggcttgcactgctcaacggtacccagttcatgagtgccaacggtgtatttgccattctcaaagccttccgcctctccaagaaagctgacctgatagccgccctttctctcgaagccttcgacggacgcatcgatccgtttatggattgcatccagcagatacgccctcaccccggacagatcgagacgggagaggctttccgtaaactgttggcaggcagcgaactgatcgaacgtcccaaagcgcacgtacaggatccttactcattccgttgcatcccgcaagtgcatggtgccacgaaagacgctatccgctatgtttcctccgtactgctgaccgaaatcaattccgtcacggacaatcccacgatcttcccagacgaagacagaatcatttccggtggaaatttccacggtcagccgttggctatctcctatgactttctagccattgccctggcagaactgggaaacatttccgaacgccgtgtctctcaattgattatgggacttcgcgaacttccggagtttttggtagccaatccgggactgaactccggctttatgattccccaatacgctgctgcgtctatggtcagtcagaacaaaatgtactgctatgccgcatcgagcgattccatcgtttcatccaacgggcaggaagaccacgtaagtatgggggccaatgccgcaaccaaactttataaagtgatggacaaccttgaacatatccttgccatcgaactgatgaatgctgcgcagggcatcgatttccgccgtccgctgaaaacgtctccgctgctggagagtttcctgcatgcctaccggaaagaagtgccttttgtgaaagatgacatcgtgatgtataaagaaatacataaaacagtcgcttttttaaaaaggactaagttagagtactaaacctcctttttcgcttttcgttaataatggtgactgttattgccggataaacgatcgattcttatcggtatttatccggcatttgccgattattctccctcttacagcgataaaactttacttcatatacctctattccttacttttgctctatatttcctcttaacacttgttttcatatacctctaatgaatgataatatttatcaaatgggctataaataaaaggaaacttgatttgttaattgagttttctatatatctttgttccgtttttcgctttaaatggtgaatttatagaaaactgagtctaacaaaatctaaaaagagtgatgatggagcatggaagagacgcgtcccaaaaggcggagctgagagaacggattataatgaccgcgacagaagcttttactttgaaaggtatcaagtgtattacgatggatgacattgcggcagcattgggcatttccaaacgtacgctctatgaggtttttgcagataaggaatcattattgaaagagtgtattctgcaaaagcaagctgaaagagacaaatacttgcaggagatatacgagcaatccaacaatgtgctggaggtgatacttgctgtctttcagaaaagcatcgagatctttcatcagaccaacaagcgcttcttcgaggatatcaagaaatatccgaaggtatatgcgatgatgaaagaccgtagtgaaagtgactcggagaagacgatgtctttctttaagtcgggggtagagcaaggtatctttcgggcggatgtcaactttgagatagtcaatctgttggtgcgcgagcagtttgatgtgctgttgaatacggacatttgcaacgaatatccttttatagaagtatacgaatccatcatgtttacctatatacgtggcatttccacggaaaaaggagccaaagttttagaggaatttatatcagaatatcgtaaaaaccgggtcgagcaacaataggagctaggttcggatgacaaacaattaaggatcaaatagaaacgagtttatgaacagattgaaaagattgacaggcaagaaaatgcttctgacggcaatggctctctgtgcgtttggctttgcaaaggctcagacggagcagacaacgcagaatacgctgacattgacgctggacaaagccctggaaatagcgttggatgagaatcctacgataaaggtggcggcagaagaaattgccttaaagaaagttgcaagtaaggaagcgtggcagagcctgttacccgaagcaagcctaaacggatcactggatcacacgatcaaagcggctgaaatgaaactgaacgatatgtcgttcaagatggggcaggatggtacgaataccgccaatgccggactgagcattaacctgcctttgtttgcaccggcagtctaccgggccatgtcaatgacaaagacggatatcgaactggcagtggagaagtcgcgtgcttccgaactggatttgatcaatcaggtaaccaaggcttattatcagctgatgcttgcacaagatagttatgaagtgcttcaaggcagctataagttggcagaagataatttcaatgtcgtgaacgccaaatatcaacaaggtgcagtcagcgaatttgacaagatcagcgcagaagtacagatgcgcagcatcaagccgaatgtcatttctgccgccaatgccgtgacgctggcaaaactccagttgaaagtgttgatgggcattacggctgatgtggatattaagactgacgataatctgacaaactacgaatcaatgctgtttgccaatcagttgaaagaagaagatatgagtctggagaacaatacaacgatgaagcagttcgagctgaatatgaaattgctcgaaaagaacgtgaagtcgctgaaaacgaacttcatgcctactttgtcgatgagcttctcttatcaatatcagtctttgtataatccgaacatcaatttctttgattatacgtggagcaacagttcgtctttgatgttcaatctgagcattcctttgtatagggcgagcaactttacgaaggtaaaatcggcccgcatccagatgcgccagcttgactggaaccgtatcgatacggagagaaaactgaatatgcaggtagtcagctaccgtaacaatatgactgccagttccgagcaggtggtcagcaacaaagaaaacgtgatgcaggctgaaaaagcggtacagattgccggaaaacgttatgaagtcggtaagggaaccgtgcttgaacttaacagttcgcaggtatcactgacgcaggcacaacttacttacaatcaatcaatctacgattacctggtagctaaggctgaccttgatcaggttttgggaaaacaataaagatagacaactaaaattacaactaaggaatatgaaaaaaggtatccaattagtggctctgctattgacagtagtaatgagctcatgtacgggtggaaaagataaggctgctgtgaaacaggaagacgagaagcccagagtaaaagtggctgatgtaacagcccgtcccgtagatcagatacaggattatacagcgacggtagaagctgaagtaaagaacaacattgctccttcgtcacctgtccgcatcgaccggattctggtagaagtgggcgaccgtgtatccaaaggccagaagctggtgcagatggatgcagccaacctcacacagacgaaactgcaactggacaatcagaaaattgaatttaatcgtatcgacgaactttataaggtaggcggtgcttccaaatcagagtgggatgctgcgaagatgcagctcgatgtgaagcagactgcttatgataatctggtagagaatacgtttctgttgagcccgatcaacggagtaatcactgctcgtaattacgataatggtgatatgtatagtggcggaagtccggtgctggtagtagagcagatcactccggtcaagctgatgatcaatgtgtctgaaacctacttcacgaaggtgaagaaaggcgaaccggtagatgtgaagctggatgtatatggcgacgaactgttcaagggaactatcagcctgatctatctgactatcgacgcaactacccgtactttccagatcgagatcaagttggacaacaaagatcagcgtgtacgtccgggaatgtttgcccgtgctaccttgaacttcggtacggcggacaacgtcgtagtacccgacttggctattgtgaaacaggcaggttccggcgatcgctatgtgtacgtttataaagatggcaaagtgtcctacaacaaagtggagttaggcagacgtatgggctcggagtatgagctgaaatccggtgtgcccgataactcgcaggtggtagtggccggacaggcacgtctgataaacggtacggaagtagagatcgagaagtaaaatcactattaaactaatcactataaagaaatgagtttatacgaaggtgcggttaagaaaccgattatgacctccctctgctttctggcagtggtgatttttggtcttttctctttgtccaagttacctatcgacttgtatccggacatcgatacaaatacgatcatggtaatgaccgcatatcctggcgcaagtgcttcggatatagaaaataacgttacccggccgctggagaataccttgaatgcggtgagtaacctgaaacatattacctctcgttcttccgagaatatgtcattgattacattggaatttgagtttggtaatgatattgacgtgctgacgaatgatgtacgtgacaaactcgacatggtaagctcacagctgccggatgatgtcgagaatccgatcatcttcaagttcagtacggacatgattccgattgtattgctttcggtacaggccaatgagagccaagccgcgctttacaagatactggacgaccgtgtggttaacccgttggcacgtattcccggtgtgggaacggtgtctatcagtggtgcgccgcagcgtgagattcaggtatattgcgaccctaacaaactggaagcttataacctgagcattgaaactatcagctctattatcggagccgaaaacaagaatattccgggcggtaacttcgatatcggtagtgagacgtatgccctccgtgtggaaggggagtttgatgattcccgccagttggcagatatcgtagtaggtacgcacaatggagcgaatgtcttcctgcgtgatgtggcccgcatcgtggatacggtggaagagcgtgcgcaggaaacctataataacggtgtgcagggtgcgatgattgtggttcagaagcagtcgggcgccaactctgtagaaatttcccgtaaggtagaagaagcgcttccgcgtttgcagaagaacctgccgagtgatgtgaagctgggagtgattgtcgatacttccgataatatcttgaatacgattgacagtttggcagagactgtaatgtatgccttgctgttcgttgtgatcgtcgtgttcctgttcctggggcgctggcgtgcgacattgattatctgtatcacgattccgctttcgttgatcgcttcctttatctatttggcgattaccggaaatacgatcaacattatctcactgtcgtctctgtctattgccatcggtatggtggtggatgatgcgattgtggtacttgaaaacgtgacgacacatattgagcgtggctcggacccgaaacaggcagcagtacatggaacgaatgaggtggctatttccgtaatcgcttctacgctgaccatgatcgctgtgttcttcccgttgaccatggtaagcggtatgtccggtgtgctcttcaaacagctgggctggatgatgtgtgccatcatgtttgtgtctaccgtggcggctctgtcactgaccccgatgctctgttcgcaattacttcgtttgcagaagcgcccgtcgaagatgttcaagctcttctttactccgatagagaaagcgttggacgcactcgatacaggttatgcgaaaatgctgaactgggcagttcgtcatcgtccggttgtgattgtgggatgtattgctttcttcgttgtcagcttgctgtgtgcgaaaggaatcggtacggagttcttccctgcacaggataatgcccgtattgctgttcagcttgaattgccgatcggtacacgaaaagagattgctcaggaactttccgagaagctgactaaccagtggctgacgaagtataaagatatcatgaaggtatgtaactataccgtaggtcaggcggactcggataatacgtgggcttccatgcaggacaacggctcgcacattatttccttcaacatcagtctggtagacccgggagatcgtgatatctcactggaagcagtctgtgacgagatgcgtcaggacttgaaaggttatccggagttcagcaaggcacaggttattctgggaggtagtaatacaggtatgtctgctcaggcaagtgccgactttgagatatacggatacgatatgacgatgactgatagcgtagcagcccgtttgaaacgtgagttgctgactgtgaaaggggtgaccgaggtgaacatcagccgtagtgactaccagcccgagtatcaggttgatttcgaccgtgagaagctggcgatgcacggactgaacctggctacagccggtaactacttgcgtaatcgtatcaatggtgccgttgcttccaaatatcgtgaagacggggatgagtatgatatcaaagtgcgctatgcacccgaatatcgtacaagtctggaaagcatcgagaacatccttatttataatgccaaaggcgagtccgtgcgtgtaaaagatgtcggaaaggtagtcgaacgttttgcgcctcctaccattgagcgtaaagaccgtgaacgtatcgtgaccgtatccgccgttatctccggtgctccgttgggtgacgtagtggcagcaggtaacaagcttattgataagatggatattccgggagaaatcacgattcagatttccggttcgtatgaagaccagcaggattcgttccgcgacttgggaacattgggtatcctgattgtcattcttgtattcatcgtaatggcagcacagttcgagtctctgacttatccgttcattatcatgttctctctgccgtttgcatttagtggagtcttgatggcgttgttctttacgggcagtacgctgagtgtaatgagtttgctgggaggtatcatgctgatcggtattgtggtgaagaacggtattgtgctcatcgactacatcacgctctgtcgagagcggggtatggcggtcatcaactctgtggtgacatctggtaagagccgtctccgtccggtattgatgacaacagctactaccgttctgggtatgatcccgatggctatcggtggcggacaaggttctgagatgtggagtccgatggcgattgccgtaatcggtggtctgacggtatctactgtgttgacactcgtcctgattcctacgctgtactgtgtatttgccggaacaggtatcaagaacagacgtcgtaaactccatcgcaaacgcgaactggatgtctacttccaggaacataaagatgaaattattaagaaataacagaaaagaaatatgaaatcagtattgataacattcgatcaggcgtattacgaacggatcatggcattgctcgaccgtctgaactgccgtggctttacataccttgaaaaggtgcagggacgtggctcaaagacaggcgatccgcacttcggcagccatgcctggcccagtatgtgttcggctatccttacggtggtcgatgacaataaagtcgatccgttgctggatacactgcataagatggacttacagaccgaacagctgggattacgtgcatttgtatggaatattgaacggaccatctagcgttcgaacagtgaataaataatcggaagggagaatctataaataatgtagattctcccttcttttttcttgcttttccctatctttgcagcctgaaaacgtccggcaccgatgaacttgtggtccggcaccgatgaggccttccttcggcaccgatgaggaggtggctcggcaccgggtaaaaaacgaggactcaatgagtgcttatatctacttataagatggagattatcaagaactacctgaaatattcgttatggcttgtactgatcgtgtttgcagcactttttgggttgcactggcttccggctataacgatcgacggacacacgatgaggcgtgtcgatcttttaagcgatcttcgctatccgaagcaggaagtggcggtagccgattcggataccattcctttacctcctgtcgtaaagccggtttttgtcgatacttgtcgtgcgggcatgacttgtattgaagattacggtgactctacccgtcgcggtatggcttctttttatgaagcgctcgaccgtacttcttcttcacatccggatcatgacgggctggtacgtatcgccgttttcggtgattcatttatagaggcggatatctttacggctgatttacgtgaaatgcttcagaagcggtttggcggttgcggtgtcggatttgtcacaataacttcgatgacgagcgggtatcgtcctaccgtgcggcatactttcggcgggtggtccagtcatgcggtgacggacagtgtgtatttcgataaaaagaaacagggtatttccggacattactttattccccgtgaaggagcatacgttgagttgagggggcaaagcaaatatgcttcgctgcttgatacctgtcagcaggcttcgattttcttctataataaagattccgttcatcttactgcccgtgtgaatcggggggagagtaagaattattccttagcgccttcgggcgatttgcagaagatttccgttgaaggacgcatcggctctgtccggtggacggtagatcgtgccgattctacgttgttctatggcttggcgatggatggtaagaaaggaatcattcttgataatttctccttgcgaggcagttccggcttatcgttgcgggggattccgcaacaaatgctgcgtcagtttaacgagcagcgtccttatgatctgattattcttgaatacggattgaatgtggctaccgaacggggacgcaattatgataattatcagaagggactgctcacttctatcgaacatctgaagaattgttttccacaggcgagtcttttgctgttaagcgtcggcgaccgtgattataagacagaagacggtgaacttcgtaccatgccgggagtcaagaatctgattcgctatcagcagaacattgctgccgaaagcggtatcgctttctggaatatgtttgaagcgatgggaggcgaaggcagtatggcgaacctcgtacacgccaaaccttcgatggcgaactacgattatactcatatcaacttccggggaggcaaacatctggcaggactgctctatgaaacattgatatatggtaaggaacaatatgacaggaggcgtgcttatgagcaagaataacctgttgctgggctttatcttgggactgatggcaacattctttcttctttcggcaggaaaggcgcaagaccgtatccctgcctgtcctccactggggaagaccttgaaaatgataaaacctttgcgggaaatgaactgggcgaatgataccatcgccgtgcagacttcttttccttccgctttccgcgaaaccggaagggatgagataatcgacagcattgccctgctgacacccgtatttgaacgtctccgtcaggtacgtgccggactttccgaagatacggtgcgtattctccatatcggagacagtcacgtacgcgggcacatctatccgcagactacgggaacgctgctgaaagaaacctttggtgctgtctcttataccgatatgggggtgaacggggctacctgtctgacgtttacccatccgggacgtattgccgatattgcagccatgaagccggaactgctgattctgtccttcggaaccaacgaaagccataaccggcggtataacgtcaacctgcattataatcagatggacgaacttgtcaaactgttgcgcgacagccttcccgatgtccctattcttctcaccacgcctccgggttcttacgaaagtttccggcaaaggcggcggaaacgtacgtacgccatcaatccccggacggttacagcggcagaaacaattcgccgttatgccaaagatcatcgtctgctcgtgtgggatatgtacgatgtagtagggggcaagcgccgtgcctgtaccaactggacggaagcgaaactgatgcgtcccgatcatgtgcattatttacctgagggatatatcctgcaaggaaatttattataccaagccattattcaagcttataatgattatgtttcccattgatattgatttcagccggttaaaagaggtgcttacctacgatccgcaggcaccgatgatattcagcagtggtatcttcctttggctgtttgccgcctttatgatcgtatacaccttgttgcagcgtaagtatacggcccgtattctgtttgtgacgcttttctcttattacttttattataagagcagcggcacttactttttcctgctggcgctggtcacggtttgcgacttcctgctggcgcaatggatggaccgtaccgaaggacgctggaaacgcaaagggttggtgactctgagtttgggagtcaatctgggacttcttgcttacttcaaatataccaattttttgggaggagtgattgcctcgttgatgggaggagaatttacggcgcttgatatattcctgcccgtaggtatctcattcttcactttccagtcattaagctataccattgacgtttaccggaaagacatcaagccattgaccaacatactggattacgcgttttatgtatccttctttccgcagctggtggccggaccgattgtgcgtgcccgtgactttattccgcaaatccggaaaccgcttttcgtttctcaggagatgttcgggcgggggattttccttattctctccggtttgttcaagaaagcaatcatttccgattatatcagtgtcaacttcgtggagcgtatctttgataatccgaccctttattccggtctcgagaatctgatgggagtatacgggtatgctttgcagatttactgtgacttctccggatatagcgatatggctatcggtatcgctctgctgttgggctttcattttaatctcaactttaattctccttataagtccgcctccattactgaattttggcggcgttggcatatctcattgtccagttggttgcgcgattacttgtacatatccttgggaggaaaccggaaaggtaagttccgccagtatctgaatctgattattaccatgtttctgggtggattgtggcacggagcttcctggaactttgtactttggggaacatttcacggcatcgctttggcggtgcataagatgtggatgtccatcataggtcgtaagaaaggagaacaaagtcatggctggcgtcgtgtattcggagtcattatcactttccactttgtctgtttctgctggatattcttccgtaatgccgattttcagaactcgatggatatgttgagacagatattcaccactttccgtccgcagcttttcccgcagttgatcgaaggctactggcgcgtgtttgctttgatgctgctcggctttctgcttcatttcactccggatagttgggaaaatgctgcttgccgtggagttattcgcttgccgttcttagggaaagctctgctgatggtggctctgatttatctggtcattcagatgaagagttcggagattcagccgtttatttatttccagttttagctttctttccacactgttttgaattaaatgatagtcaatagtatcttaattctcctccttcccgaaggaggagaatggagatactaccgacttttgggcatccccaatggagatactactgtttgattcatttttaaacagttgtgaacaaatctctatgcaatctgtattttagtctatggacgtgtgtggtattttgcgctagctttgccacgaacagataaatagacgtactatgagatatagaatcctctttttctttttggcttttatcggaataagccagttcgtgacatcgtctgatgtccgtaataaatataatttcaattcagactggttgctttatgtgggcgatgttcccgaggcaaagcagccgcgtttttctgattcggagtggaagaaagtgactttaccgcatgccttcaatgaagatgaggctttccgcctgagcattgatgaactgaccgatacgattatgtggtatcggaaacatttccgtctgcctgccaacagcaagaataagaaagtttttgtagagtttgaaggagtccgtcaaggggcggatttctatataaatggtcagaatgtcggcctgcacgagaatggtgtcatggctgtcggttttgatctgactccttatattaagtacggacaggaaaatgtaatcgcagtccgcatcgacaatgactggaattataaagaacgggcgacgggcacgaaataccagtggagcaataagaactttaatgccaattatggcggtatccccaaaaatgtatggctgcacgtcaccgaccgtctgtatcagactttacctttatatagtaatctcaaaacgaccggagtctacatctatgccgaagacatccgtgtgaaatcacgcaaggccattattcatgcggaatctgaaatcagaaacgaatataaccgtgataagcaggtttcctatcaagtagaactgatagaccgtgatggtacatcgatccaaacattcgaaggaacaaaggcggtagtgaaaccgggtgagacaatcacgctgaaagcggcatccgaagtggataacctgcatttctggagctggggatatggctatctgtatacagtaaagacaagcctgtgggtagatggcaggaaagtggacgaagttgccacccgcaccggattccgtaaaacgcgcttcggtaaaggaatgatctggctgaatgaccgtgtcattcagatgaagggctttgcccagcggacaagcaatgaatggccgggagtcgggatgagcgtacctgcctggctgagcgattatagcaatcatctgatggtggagggcaatgcgaacctcgtgcgctggatgcatgtcaccccgtggaaacaggatatcgagtcgtgcgaccgtgtaggattgattcaggctatgcaggcgggagatgccgaaaaagattgtgaaggacgtcagtgggaacagcgtacggaattgatgcgcgacgccatcatctataaccgtaataatccgagtatcttattttatgaatgcggcaatgagtccatcagtcgtgaacacatgattgagatgaaagcgatacgtgatttgtacgatcctcacggcggccgtgcaatcggttcccgtgaaatgctggacatccgcgaggcggaatatggcggcgaaatgctgtatatcaataagagtgcgcatcatccgatgtgggcaatggagtattgccgtgacgagggattgcgcaaatactgggatgattattcctatccttatcacaaggatggagacggcagcaattcttataagtccaccgttaccaacaaagtacagaagaaagtggatgcccgtgtctacaaccgtaatcaggattcctttaccatcgaaaatatcattcgctggttcgattactggcgtgaacgtccgggaacgggagaccgtgtaagttcgggtggcgtgaagataatcttctctgataccaatacgcactatcgcggagtagaaaattatcgtcgtagcggagtaactgacgccatgcgtattcctaaagaccctttctttgcacatcaggtgatgtgggacggctgggtagatacggaatgtcctcgcatctatatcgtcggtcattggaattataatgacacggtactgaaaccggtatatgtcgtatcgagtgccgataaagtagaattatttctgaatggtaagtctttgggcaatggtgaacgggattatcattttctgtataccttcaaagatatcgctttcgtaccgggcagactggaggccgtaggatacgacgaaaaaggaaaagaatgttgccgtactcagttgcaaactgccggcaagccggaacagattcaattgagcttcatccagagtcccgaaggatggaaagcggatggtgcggatatggtactgcttcaggtagaagtcatggataaagacggcaaccgttgcccgctggcaaatgacttgatacactttgaagtagaaggacctgccgaatggcgtggcggcatcgcacaaggagaaaataattatatcctttcaaaagacttgccggtagaatgcggtatcaatcgtgctttgatccgttcgctcactactgccggaaacgtccgtatcacagcgaaggccgacggattgaagccggcagaaatcagccttacttcctcacctgtcgaagtgaaaaacggtttgagcaactatatccccggtgatgaactggaaggcaggctgactcgtggcgagactccgcagactccttcatacaaggtctcaaaagtggatgttggtatcgtttccgccattgccggagccaataatgagagtacagtcaacagtttcgatgataatgaactgagcgaatggcggaatgacgggaaagcagctaccgcatggattacctataagttggaacgtgccgcacgggtggatgaagtctgcatgaaactgaccggatggcgtatgcgcagttatccgctggagatatatgcaggcaaagaactgatatggagcggagatacggataagagtctgggatacgttcacttggatgtaaaaccggtactgaccaatgaaattaccatccggctgaaaggtacaagcaaagaaggagatgcctttggacaaatagtggaagttgccgcccctgttgccaatgaactggatttgtttaaagcgaaggatggggacaagaccggccatgaattgcgtattgtagaaatagagttcaaggagaacttgttgaaatagttttttagggtttgtatgattggttttccaaggaccgtccatcgtactgtcagtatagtgacatcatctgtcttttttgatcagaatgtgtcttctttactggcagactgaaggacgttgttccttgatttcaacctttgaatttagcaataagatggaacattattaaaatattttctctttctttgcaataacgaaaaaacattgaaccttatggattacccattgaataatcagccggttactgatcgctacgatcgcatgcaatataaatactgtggcaagagtggcttgcaactgcctctcatctctttaggattgtggcataacttcggtagcgtagataactttagtgtagcgaccgacatgattaaatatgctttcgaccatggcatcacccatttcgatcttgctaataactatggtcctgtgccgggaagtgccgaaactaatttcggacggattctcaaagaaaacttccagggataccgggatgagatgataatctcctccaaagccggccatgatatgtggatggggccttatggcggcaacagctcccgcaagaacctgatggcaagcatcgatcagagtctgcgccggacagggctggagtattttgatattttctatagtcatcgctatgacggagtcactccggtagaagaaaccattcaaacgttgattgatattgtaaagcaaggaaaagctctgtatctcggaatctcaaaatatcctcctcagcaagcgaggattgcctatgaaatgatggcaaaagcaggcgtcccttgtcttatcagccagtatcgttatagtatgttcgaccgtgcggttgaggctgaaagccttcctttggctgccgaatacggttccggctttatcgccttttctcctttggcgcaaggattactgacggataaatatctgaatggcatccccgaaggctcacgcgcggcacgtccttccacttttctgcaacgttcgcaagtgacgcctgaaaaggtggaggctgcccgacaattgaatgaaatcgcccgtcaccgtggacagacgctggcagaaatggctttggcatgggtgctgagagacgaacggatgacatcggtcatagtaggagcgagctcagtgaatcagctggcagacaatttgcaggctttaaaccagttggaatttactgctgaagaattaaacgggatagaacgaattttgtgtaaagtctgatggctctattggggtaattggactgtcatttgctgagagtgattaaaagattattaatcataattggcgcaccaaacttatttttttatacatttgcaacggactcttccgcagaaagcctccgggtggtgggggagccgtgtatatagagaagacgtttacaagcgtttgtctttcgtgtttcagaacttcgcaaactttgaccaccggaatgacgaatagcaactaagacgtcctcctgatgtgtatttatatacatccgtgcctctttttgagaaaacaaagggaggttacgggtgttgtacatatcggcgtgggctttctgcgttgttcgttctcggtggtgggcattgcgaaggccttgaacatggaacggacgaaggtaagattcccacgcttttttatatattcctttcatcttacatttatccgtttacccggtgggagtcagggggacactcataggaagattgggcatgattcatgcgggacagcttatcgaacgtacgcttcacgaacagggacgcacagttacctggttcgccggacagttatgctgtacacgtcccaatatatacaagatattcaagaaggaaaatatcgacatccatcttctttggcgcatttcgtgcatactcgatcatgatttcttccgagatttatccgataacatccgtatcggtacttcttcatgtgtatccaaataagatacatttctgtatcctatccggaactatgatttctcctgctggtatactcctttcgcatacctttgcggcatattaacataaaatcacaaaagaatatgaaaaagctgattctaattatgatgctggttttcggttgtgtcattgggacgtatgcgcaaaagactgtctttaagtttcgtgatgcgcaggcacgtgccggagatgcagtaaccgaagtttgtgtaaagcctacagttgtagaggtgaaaattcttgaagagaaaggacgaataaaggatgtatggacactgagcagagaagaggtggaagttgccatgaagggtgagcttgataacatccgtgcatggggaacttatttgtccactatcaagaacgattgtgatgtaatcatgggagccacttttaagatagaggatgatgaaaagtcgggaggatatacggttacggtcgtaggttatccgggcgtgttcaccaactggcatactgccacgacagaagattacgaatggatacgtatccagaaactttcgggtgccgatgatagaaccaaaatagcacctgtcataaagaacaagaattaataaccaaaaaacatagacaataatgaaaaaagtattatcaattgttgctgcgcttttgttgtgcgtaggaacacaggcacagattgtatcatccagaagtgcaatcgtcaagactcaaaagcaagcgagtaacacacaatggttcctgcgtgcaggcctgaacatcatgaacctcaacggtgacggagttgaagcggattcaaatattggctacaatgctacattcggctatcaaaagcctatgggcggtgccggagcatattggggaatggaattcggcctcggttcccgtgggtttaaagccgatgaaatgaaatgtatcgcacacaatattcaatattcaccgttcactttcggatggaaaattggagtagcggacaatcttagcatcgatccgcatttgggtgtttttgccagttatgactataccagcaaaatgaaagaaagtggtgaaagcatcagctggggagattttgcagattatctggaagtggattacaatcatttcgatgccggtatgaatattggcgtaggactgtggtatgaccgtttcaatctggatttcacttatcagcgtggattcattgacgtattttccgatctcgatggaatcaagactagtaactttatgatccgtctgggtattgctttctaattgagacacatagtttaatcatataaatttcagcatttgcgctcttttcttttgatggaaaagacgtgaatgctgttttcttaaacatagcagcgtatgataacaagactgagactttgggtaattgtatttttattgggtggagtactgccctctttgattgcacaaacttttactgaacaaaagaatacttatccgctcagtgcggacggcagcaaatatgtagtcaacggatttattcctttcagtccgatgatcgatgaaagtatttatgctaatgctctgttgtggactattaaaaacgtttgctctgcacagcgtgacggaataacagaagtaagcattcctgccaagagttttagttgtaacctggtgcttacttcccaggcggatgccaaacaaaagaatacgtactattgtacggcccaatttcaggtaaaagatgggaagctggtctattatctttccaatattcagatagaatcatcggtggttataatgaagaaagtcactccgatggaaaaactacaacctgagaagaagccttctcaccaggaaaccatggatgactttgtgcaaatagaatcgcagatgctgaacaaactgtttgattttgtcagcacaaaccagctttctcctatcacccattggaatgaaataaatatcggcaaaccggtaaaggggatgacagaagatgaatgcctgttggcttttggcaaaccacaaacaatctcagaatcaaatggtgaagtgcaatggatgtattccagctctttctatctttttttcaaaaacgggtgcgtggaaacgattataaaataaagaaaagaagtaatcccgaaattgcttctcgtgtcttatcatctttctattgatcggctattgtgtatgtctttggtaagaggaagtcagtgtgtgtgataaaatgatctgaaaagtagtgaagatttactagaaattctatcgcccttatgatgaacttgaacttggggagttgtgatttgttgttgatgtttattgttttaatgatagttcctgtttttaagcttaaaactttgacaataagcctgttttttatttttatttgatggtgatatatctgtgattgtgtatgaatatgtatagtgtttaagcttgctattactagttgaaaggataataaaagtgttgggtatttgagactttttttcgatatcttgttattatatatttgtgcacattgactctttgtttatcttaaagcggaacttatatttgagataaacaaaggttctatttgaaatgaacagacattttgctttatgctttctccacagtaattcaacgcgacttttgctctcatgccctaacagattgtctgtatgcctttattcatcgtagtttcaggtatggcagcaagtgtggtagcagttatgagagcaagtgtttgctctcactcttccatgtatcattatctgtcatttgtttgatgttgtcatttgatttacagtgtgttaatgtctgaggtgtcaattcttaacgattgatatttcagacattaataattgataaatcatcctttaatagttgataactccgctgtttttgagtgataaatgatttattgtttcttggaagagcaggttaatcgaacagttggtgcggtcaagttaattgaatcatataagtaaggcatcagttcctgccttgtttcacttattccatacgctggaaccactgttttcaagcgtccgaaactttgttttcacggctttgaaactaaagtttcaagccgatgaaactttagttccaagcaggagaaacaaaagtttcaagcatgagaaacaaaagtttcaagcgggagaaactaaaaagctctgtatagcccaaccaacagcccataagtaaccattgaaaaaaggcagtgtgacagcaaaatttgccgtcacactgccatcacctacttctgtcacctcattaattattcatattcaagcaattacatccgacaacgtgacagatgacagcaaattatagttttttattttcatagagagcctggctgacacgtaagtaggggttaactgaaaagtcggtagtatctccattctcctccttcgggaaggaggatatttaagatactattgactttttagtcagtccccctaagaatgttaatcgaattgttgcggatggcagagtttttttctttttccaagagtgtagaactttaaaagactcctgtctctacccttttttcgtattttcctcccttgctacgatttccccttcttcctgccttcttccttttcagtctttcaatccccttttcctccgtccttttttccttttctttggattcccgttctggtttcctttgcgcatcttcttcacctttcctgtatttcctcttcctttcccttgtgcatacgcccgtgccctcgcccttctaacgcgcgtgtgaatataataatgtgcactcctttcctctgttcctcctacatccaagaattttatgttctacaacatccttatgattcaacactttagcttctatcctcaaaaataattcaaaaaaagagtgatttaagtttggagtatatttgaaaagggcgtacttttgcacccgctttccaagagaagaaagccttgttaaattgacttagtgtaaaagcgcagtactgcttgaccataagaacaaaaaagacttccgataaagtttggaagataaagctaaaagttcttatctttgcagtccgattcgcaaagaaaaggcgttttgtttttcttctttaccttctttccctttcgctaagagagtctgagaaacgatagaaaaagaaaagcgaaaaaaacttccgaaaacatttggtagtttaaataaaacctcttacctttgcacccgcttttaaaacgaaagcagcaagttctttgaaatattgataaacaatacaagtagtacaagaaaaaaatagaaccgtcaatacttgtcttatatatatagtaatatgcatgagacgtaaggtattaatgaagtcaataaattgtacggcatcctgaacagagcaaaaatcagctttatgctgactaacaatacttttacaatgaagagtttgatcctggctcaggatgaacgctagctacaggcttaacacatgcaagtcgaggggcagcatttcagtttgcttgcaaactggagatggcgaccggcgcacgggtgagtaacacgtatccaacctgccgataactcggggatagcctttcgaaagaaagattaatacccgatggtataattagaccgcatggtcttgttattaaagaatttcggttatcgatggggatgcgttccattaggcagttggtgaggtaacggctcaccaaaccttcgatggataggggttctgagaggaaggtcccccacattggaactgagacacggtccaaactcctacgggaggcagcagtgaggaatattggtcaatgggcgcaggcctgaaccagccaagtagcgtgaaggatgactgccctatgggttgtaaacttcttttatatgggaataaagttttccacgtgtggaattttgtatgtaccatatgaataaggatcggctaactccgtgccagcagccgcggtaatacggaggatccgagcgttatccggatttattgggtttaaagggagcgtaggtggacagttaagtcagttgtgaaagtttgcggctcaaccgtaaaattgcagttgatactggctgtcttgagtacagtagaggtgggcggaattcgtggtgtagcggtgaaatgcttagatatcacgaagaactccgattgcgaaggcagctcactggactgcaactgacactgatgctcgaaagtgtgggtatcaaacaggattagataccctggtagtccacacagtaaacgatgaatactcgctgtttgcgatatacagtaagcggccaagcgaaagcattaagtattccacctggggagtacgccggcaacggtgaaactcaaaggaattgacgggggcccgcacaagcggaggaacatgtggtttaattcgatgatacgcgaggaaccttacccgggcttaaattgcatttgaatatattggaaacagtatagccgtaaggcaaatgtgaaggtgctgcatggttgtcgtcagctcgtgccgtgaggtgtcggcttaagtgccataacgagcgcaacccttatctttagttactaacaggtcatgctgaggactctagagagactgccgtcgtaagatgtgaggaaggtggggatgacgtcaaatcagcacggcccttacgtccggggctacacacgtgttacaatggggggtacagaaggcagctacctggtgacaggatgctaatcccaaaagcctctctcagttcggatcgaagtctgcaacccgacttcgtgaagctggattcgctagtaatcgcgcatcagccatggcgcggtgaatacgttcccgggccttgtacacaccgcccgtcaagccatgaaagccgggggtacctgaagtacgtaaccgcaaggagcgtcctagggtaaaactggtaattggggctaagtcgtaacaaggtagccgtaccggaaggtgcggctggaacacctcctttctggagcgatgtcgtaacaacgatttcataggttctattattgtactactggtacttgtttatttataacatatagatcaaccatctatagaagtatagatagagataaacaagagaaataaagaagccgagtctaacatcaggtagacaaggttgaactagtcctatagctcagttggttagagcgctacactgataatgtagaggtcggcagttcaactctgcctgggactactccgaacaaaaattgtcgttgccaatacattattgcgatgttcaattactcttgggggattagctcagctggctagagcatctgccttgcacgcagagggtcaacggttcgaatccgttattctccaccatctctgaaaacagagaaacgatctttgacatgatgtacaaaaagtaaaatttagtaaagagctaaaagtatatatcgaaccgtacgttttaagtaccgcgatattgagtacccgggtttaatacctgatacttgatacctgatacttaaaggtaagtttgaaagaaagtaagcaagggcgcatggcggatgccttggctctcggaggcgatgaaggacgtgataagctgcgataagctctgggtaggtgcaaataacctttgatccagagatttccgaatgggacaacccggcattctgaaggaatgtcatccatctttgatggaagctaacgcagggaactgaaacatcttagtacctgtaggaaaagaaaataataatgattcccctagtagtggcgagcgaacggggaatagcccaaaccacccatgttacggcatgtgtggggttgtaggaccacgatgtcgcaagacatttgacgagtagaatcctctggaaagtggaaccatagacggtgatagtccggtatacgaagtcaaattaagcgtagtggtatcctgagtagcgcgggacacgagaaatcttgcgtgaatctgccgggaccatccggtaaggctaaatactcccgagagaccgatagcgaaccagtactgtgaaggaaaggtgaaaagcacttcgaatagaagagtgaaatagtccctgaaaccgtgcgcctacaagcggtcggagctgcgtaagcagtgacggcgtgccttttgcataatgaacctacgagttactttttccggcaaggttaagcatcttgagatgcgcagccgaagcgaaagcgagtctgaacagggcgtcgagtcggaaggagtagacgcgaaaccaagtgatctacccttggtcaggttgaaggttaggtaacactaactggaggaccgaaccgataagcgttgaaaagcttccggatgaactgagggtgggggtgaaaggctaatcaaacttggagatagctcgtactccccgaaatgcatttaggtgcagccttgtgagttactaatgtgaggtagagcgactgataagatgcgagggcttcaccgcctatcaagtcttgataaactccgaatgcgcattagttctatcacaggagtgagggcatgggtgctaaggtccatgtcctaaaggagaagaatccagaccatcagctaaggtccccaaataaacactaagttgaactaacgaagtcagattgctaagacagctaggatgttggcttggaagcagccattcatttaaagagtgcgtaacagctcactagtcgaggagtttggcgtggataataatcgggcattaagtgttttaccgaagctatgggatcagtaatgatcggtaggggagcattccactctgcgtcgaaggtgaagcgtgagctttgctggagcgtgtggaaaagcaaatgtaggtataagtaacgataaagggggtgagaaaccccctcgccgaaagactaaggtttcctgatcaacgctaatcggatcagggttagtcgggtcctaaggctcagccgaacggtgaggccgatggcagaacaggttaatattcctgtactaccttaaggagtgacgtggagacggaggcgtgacagcgccgcggactgacggaatagtccgttgaagggtgtagatgctgattatcccaggcaaatccgggataagagtcgaacctgatagtatggagcgttcttcggaacaatccaatagtgcgtgtaatcatactcccaagaaaatccgctaaacttaatccttgaggtacccgtaccgcaaacggacacacgtagtcgggttgaatatactaaggcgcttgagtgattcacggttaaggaactaggcaaattgaccctgtaacttcgggataaagggtcccaacgagagttgggcgcagagaataggtccaggcaactgtttaacaaaaacacagggctgtgccaaattgaaagattacgtatacagcctgacacctgcccggtgctggaaggttaagaggagatgtcatcgcaagagaagcattgaattgaagccccagtaaacggcggccgtaactataacggtcctaaggtagcgaaattccttgtcgggtaagttccgacctgcacgaatggtgtaatgatctggacactgtctcaaccgtgagctcagtgaaattgtagtatcggtgaagatgccgattacccgcgatgggacgaaaagaccccgtgaacctttactatagcttaacattgaatttgggtaattgatgtgtaggataggccggagacttcgaagcaggtacgccagtatttgtggagtcgctgttgaaatacggccctttgattatttgagttctaactcgtggtacgaggacactgtttggtgggtagtttgactggggtggtcgcctccaaaatagtaacggaggcttctaaaggtgccctcaggacgattggtaaccgtccgcagagtgtaatggcataagggcgcttgactgggagacttacaagtcgatcaggtaggaaactagagcatagtgatccggtgtttccgtatggaagggacatcgctcaaaggataaaaggtactccggggataacaggctgatccctcccaagagctcatatcgacggaggggtttggcacctcgatgtcggctcgtcacatcctggggctggagaaggtcccaagggttgggctgttcgcccattaaagtggcacgcgagctgggttcagaacgtcgtgagacagttcggtctctatctatcgtgggcgtatgaaatttgcgtggctctgacactagtacgagaggaccgtgttggactgaccgctggtttaccagttgtgccgccaggtgcattgctgggtatctaagtcgggattggataagtgctgaaagcatctaagtacgaagccagccacaagattagatttcttagggtcgttaaagacgatgacgttgataggatgcaggtgtaaaggtggtaacatcaaagccgagcattactaattgcccgttcactttctttcggacggtgcggatcgcgatatatacgtttagcttttttaattgacaattgacaaatgacaaatgacaattgacaattagattaacagatacttgaattttactttttatcatgtcataacttatcatgacagctgcgataattgtcatttgtcaattgtccattgtcaattgaagaaattcaggtggttatagcacgagggttccacctcttcccattccgaacagagaagttaagcctcgtcacgccgatggtactgcgtaacagtgggagagtaggtagccgccatttttagagaagcccttccggtagaaataccagaagggctttattgttttggatactttcggatttaagactggagaggatttattgattatacatatttctctcaattattaaacttggcggacttctttaaaacgtatgtacgcctaactacttttaacacataaaatcacaaactgcgagaacaaaacactttgtacgttgtttcaataatagagttaaacttttatgcttaaatgatgtgaataacgacaaacggatatatttaattgctacatttgtcgccgaaatacgagaattcgatataaacaactaaaataaatatcatgaaaggttctgtgagattcatattagcgattgttctgctgatgctatcatatagcataggtggaaatgctatgaatatcacttcatgtatttctcagagcgaatgctcttgtcagttgtctgaatcaacttccgatacgaattctaattcttcatttaagactcgttcgctggggtatgacagatcatcccagtctttgtctatttctgacgtagaattaggctttaaatcagtaacagaaacatcttctaataattatcgtctgcgtagaatcattgaatccaatgatttctttaaagacgttatgtataagttcttcttgttaagagaaaactcacttgtattagatcaaagtaaatcctattattcggataaggatccacattactccattatctgtagcgactactacgtgttcgctctaagacgtatccttatttaattacttatcccatcttatttactttttcgtaccctgtatgaagctgtgtgactttcattcttgaaaagtcacagggtctatagcgcagtgtatctaatcatttgaaaattttctaaataactaaaattaatatcttgtcaaaaaaacttattatggaaactactaaaaagtctcagattgtaggtataaagaatgccggtatcgtaatcatctgctgtttcattgtagcagtgtgtatttttcagttcctgttgggaaatccgtctaactttatgaataatgaccctaacaaccatccattgaacatgttgggtaccatttacaaaggtggtgtgattgtgcctgttattcagacactgttgttaactgtactcgctttgagtattgaacgcttttttgctcttcgttctgctttcggtaaaggctcgttggctaaatttgtagctaacatcaaagaagctctggctgccggtgaccttaagaaagcacaagagatttgtgacaaacaacgcggttctgttgccaatgtagttactgctactttgcgcaagtatgaagaaatggaaaagaacactgctttgcctaaagaacaaaagctgctggctatccagaaagaactggaagaagcaactgctctggaaatgcctatgatgcagcagaatcttccgattatcgctacaattactactttaggtacattgatgggattgctcggtactgtaatcggtatgatccgttcatttgccgcattgtccgccggtggtggtgccgactctatggctttgtcacaaggtatctctgaagccttgatcaatacggctttcggtatcttgacaggtgcgctggctgttatttcttacaactacttcactaacaaaattgacaaattgacttacggactcgacgaagtcggattctctatcgtgcagacttttgcagctactcattaatttggcgaaccctttaaaatctattaatcatgggtagagcgaaaattaaaaagaaagatacgttcatagatatgaccgctatgagtgacgtaactgtattgcttctgactttctttatgttgacatcaacatttgtgaagaaggagccggtgcaggttaccactccagcctccgtatcggaaatcaagattccggagacagatgtactccagattctggttgaccaggaaggaaaaatatttatgagtctcgacaagcagcaggatatgcaggctgtcttggagagtatgggtgaagagtatggcatcaagttcactccggaacaggcaaagaggttcacagtggcttctacgtttggagtgcctatcagaagtatgcagaaattccttgacctcccggaagatcaacgggacaaaattctgaagaatgaaggaattccttgtgatagtaccgataatcagttcaagtcgtgggtgcgtaatgcacgtgccgccaatgctgatctgcgaattgctattaaagcggacgcttcaactccatactcagtgataaagaacgtaatgaactcacttcaggatttgcgggaaaatcggtacaatctgattacttctctcaaagcagaatctgaaaattaaaagggaggaaagacaatgagtgctgaagtacaagagagcagcggaaaaagaggaaaaggtaagcagaagaaaatgactgtccgggtagactttaccccgatggtggatatgaacatgttgctgattactttctttatgctttgtaccacgctgagcaagcctcagacgatggaaataagcatgccgagcaatgacaaggatataactgaacaacaaaagagtatggtgaaagcctctcaggcaattacattattgctgggagccgataacaagctctattactatgagggagagcctaactacaaggattacacctcattgaaagagactagttacggggcaagcgggttacgtgccgtacttcttcagaaaaatgctgcagctgtcaatcaggtaagagctttgaaacaacagaagctcgatctgaagataacagatgacgaatacaaaaagaaggtttccgaaataaaaagcggaaaaaatacgccgaccgtcattatcaaggcgacggatgatgcttcttatatgaatctgattgatgcattggacgagatgcagatatgtaatataggtaaatatgtgataacggatattgccgaagctgatgagttcctgattaagaattatgatgctaagggagaactgtcacagaacttggccgataaatgatgtaacacctaaaaaaagaaagtaaaatggcaaaattagatttagcttcttcggaatggtgtcagctgatttttgaaggcaagaatcaagcgtacggcgcatatagaatgcgtgccaattcacccagacggcatactattgcaatgctgattgtggtggcgatagcaatcgttggatttactatccctacgctgcttaagttggcaaccccggagcaaaaggaagtaatgacagaggtaacaactttgtcgaaattggcagaaccggaaatcaaacaggaagagatgaaacgggtagaaccggttgcacctccccctcctgcattgaagagttctattaagtttactgcccctgtcatcaagaaagatgaagaggtgcacgaagacgatgagatcaagagtcaggaagaattgacttctaccaaagtggcaatctccattgccgacgtaaaaggtaatgacgaagccaacggagccgatattgctgacctgaagcaagtggtgacacaggctgcagaaccggaaaaagtatttgatatggtagagcagatgccgaccttccccggtggacagcaggaactgatgtcataccttggaaaaaatatcaagtatccgacaattgcacaggagaatggaacacaaggtcgcgttattatccagtttgtggtagagcgtgacggtactatcaccgatgtgcacgtagctcgtggtgtagacccttacttggataaagaagccgtgcgtgtggtacaaagtatgccgaaatggattcctggtaaacaaaatggtaaagcggtacgtgtgaaattcaccgttccggtaatgtttagattacagtaagatgatgaagagacaattttggctggtaggaatcgttttgttggcggtgttgagtgcttgccgttccaaatcggatggaccgacggatacgtattcgtctggggtgatatctattgcggcggatgaaagttttgagcctattatacaggaagagatagatgtgtttgaaagtctgtatcctttggccggaattgttcctcgctacacgacggaagtcgaggctattaatttacttctgaaagacagtgtccggttggctattgcaacccggacattgactgaggaagaaatgaattcctttcacagccgcaagttctttccccgcgagattaagctggctacagatggtctggcattaatcgttaaccgggacaatccagattctttgttgaccgtacgggatttcagccgcatcctcactggtgaggcgaaagactggaaggatataaatccgaactcccgcctgaagagtattcaggtggtgttcgataataaaaactccagcaccgtacgctatacaatggattctatctgtggtggaaaaccactggctactgacaatgtcagtgccttgaagaccaatcagcaggtgataaagtatgtagcagagaaccccggagcaatgggagtcattggtgtgaactggctgggcaaccgcagcgacaccaccaacctttctttcaccgaggaaatcagagtaatggcagtgagtgcggaggatgtagctactcctgctaacagttataagccttatcaggcttacctgtattatggtaactatccattggcacgacccatttacgcattactgaatgatcctcgcagtgcgctgccttggggattcgcttcttttatgacatccgacaaagggcagcggattatattaaaatctggacttgttccggctactcagccagtgcgtattgtccatgtgaaagacgaataataactaaaattagagactatcatgaaaagagtacaaatgtttttagctggagcgtttatagcagttgggtcgctctatgcgcaatcatctgatgccgaatggcaggcaggagttgcaaaattgaaagaaaccattcagacgaatccggctcaggccaatgaggaagctgaacagttgataaaaggaaagaataaaaagaatgtggaacttctggtggctatcggcgaggtatatctgaaagccggaaaacttccggaagcacaggagtatgctgctcttgccaaaaaagtgaatggcaaatcggctcttgcctccgtactggagggagacatcgcctttgagcagaaaaacgccggtctggcatctcagaaatatgaagaagctatctatttcgatccgagttgcacagaagcatatctgagatatgcggatatttataaatcagccaatgctgctctggccattgaaaaactggaacagctgaaagcccaggaaccgtccaacacagccgtagataagaaacttgccgaaatctattatttgaagaatgattttagtaaagccgccgaagcttattcgcgttttgcgatgggaccgacagcgacagaagaggatttagtgaaatatgcatttgccctcttcctgaaccatgacttcgagaagtcacttgaagtggcgaatatgggattgaaaaagaatgcgcgtcacgcggcgttcaatcgtctggcaatgtataattatacagacctgaagcgctttgatgaagcaataaaagcggcggatgctttttttaccgaatcggacaaggctgattattcatatcttgactatatgtattacgggcatttgctcgaagctctgaagaaatatgatgaagctgtaggacaatatgagaaagccatacaattagatccgacaaagacggacttatacaaaaatatctcttctgcttatgaacagaagaatgattataaaaaagcaatcagtgcttaccagaaatattatacatcccttgataaggaacaccagactccggatttacaattccagtttggcagactttattatggtgcaggtacgcagactgattcgctgacaatcaatgctgaagaacgcaagcaggctttgatggctgctgattctgttttccattccatcgcagaagcagcaccggacagctacctgggtaatttttggagggcacgtgccaattccgcacttgaccctgaaacgactcttggactggcgaagcctttctatgaggaggtagccaccctgctggaaagcaagaatgatcctcattataattcagctttgattgagtgctacagttatcttggatattactacttgttggctattgaaaatccggcactgaaagcggaagcaatggcgaataaagaaaaatcgaaggagtattggagcaaaattctggctatagactccactaatgctactgctaaaagggcattggatggcatcaaatagtgaataattttagttgtttgtcgtgacaggaggagtggagagtgatcttagctcctccttttttagttcgcccagcacgaacatattctaacgggtgtaagtccctaaagcgccctgacaacgggaagtatatagccaacggcaagggtgtccatcgtgaggtggaatctgaaggaagcctgcggcaaatatctggtctgacgtacagaaacttgatattaaggcttaaggatgtggataagtttgctaaacaaaacgaagtcctatagttgtccggaacatccaaagtaaatcaagcagacataagatggaaagaatatgtccataactggggaggtctcacgggcgaggaaaaataaataaatacagtcaagcagtaataacgaaccgtgagaagtcagcagaggtcatagtaaccgacaaggtaaaaaaatcggcagtcggtgaaggactgaacttttaatcaaacaagtaccatttaatactttatgaaagagtcaatgcggaaaatcagtaaaacgaactgcccacaaatggataggacagcatccgacgagtatgtgggagtgcagacttttatggagataaaagatgagcagcttgtggaagtgcaattggaagaaaacaatctgttggaactccttctaagtccatcgaacttgaatgcggcataccgccaagtcgtaaggaatggaggagtgggaggtgtcgataagatggagacgagcgaactgttgccataccttaccctccataaagacgaattgttggaaaagatacgcagggggaagtatcgtccgtcccctgtgcgcaggttagaaattccgaaagacaacggtaaaactcgcccattaggtatcccgacagtggtagaccgctttgttcagcaggcaatcagccaagtgttgataccgctttacgaacctcagttcagtgacaacagcttcggcttccgccctcatcgtagtgctcacgatgcactgcataaggtgcaggaatatgcagaccaaggttatcgctactgtatcggtttggatttggaaaagttctttgaccgtgttaaccacagcaaactgatagaggtcttatcccgaaccgtcaaggacggcagtgtaatatctttgatacacaaataccttaatgcaggagttgtagtatctcacaaatacgcggagactgccgagggcgtcccccaaggtggtccattgagtcctatattgagcaatattcttcttaatgagttggaccaggaattggaacgcagggggcacccgtttgtccgctatgccgatgattgtctgatccttgtccatagtcttcgggcaacggagcgagtccgtgatagtatttccgagtttatagaaaagaagttattcttgaaagtaaacaaagagaagacagaagtcggttccatctgcggcaagaagtatcttggacactccttctactgaagagccgaccgtaaatgtggtcttaatcttcataagaaaagtcaatccaagttcaaacgcaccatcaagcacctgaccagccgtagtagtggtcaaggctacgcttggctgaaactccacctgacgcaatacatccgaggttggctgacatactatcgttatgccgatatgaaagattttataatcaaaacagcgaagtggtacaatcgtcgtcttagaatgtatatatggaagagttggaagcgggtacgtacacgttttgccagcttgcagaagtgtggcatccctcgtcggaaatcttgggaatgggcgaatacccgtaaaggctattggcgcattgcggatagttggatattgcatagagcaatcacaacagataagcttgtaatggcgggttatccgtcaatgataattctttatacccaattgcatcgcagttaagagaaccgccgtatgccgaacggcacgtacggtggtgtgagaggtcggaaaacgaaagtaggaggaaaacttctacttcgttttcctcctactcgatttgtcacgtttagctgtttttcagtctgttacattcctttggtaagcgtaaagcagtcgatgtccggtgcccagttgtagctgttgcccatacggatatgattgtaaccggctttcagatcaacggggattgtgacttgattgtgcttgtcatcttctcccagtgaatcgattttggttacgatgccgttgacatctatctccagttgtcttcctttgccgaatgaataatgaaccgtcatttggtaacgtccgccgtctgcactgtatacttccgaccattctgcgtaattctccggttgtccgcccaagaaacctactttcatttttccggaagcttcctgatcggcggcatatatgatgcctttcggatttttgccgagatcattgaacattggcaggtatgcccattctgcttcatataatgtcggttccagacgtgtttcgccttccatgcggaggaacatagcgctgtgtgcaggaagcgtttgctcaaagacatcagagaaatttcccaaatcactgcgttttgccaagtcacgtacttttacgttcccgccaaattccagtgccgagaaaggtacggagaagctacaaacggtgtccgatggattgtaaagagcaacggcacgtacatttccacgtttttgttcgatgtcttttaccagtacatagccttcgttttcatgttgtgctacgtatgcctgcaagcctagcgggtcttggttcagagcgattaattctttgtttgtcagcagttcaagagaagattccggcagactttccagattacatccgatcagcaggggtgagctcatgatacaccataagccgaagtgagcttcttcttctgtcggggtaagtccttttcctcctactttgctgttgtcgcggaaaccgatgaccatcatatccatgtcattgtaatgtccgtctttggcgtaggcagacaagtataggtttttgccgaccacatatttcaatgaaccccaatgcgcattgatgtcaccactgatacgccatgaagtagctacatcctttgcccatgtgccgggaaaagcccaacggcagatgttgacagagacgtccttgtttactttgtcgatgctgttccggatggaagtatagcgttcctgttcattcaggcccagtacatctccgccgcaatagtctatcttgataaagtcgaatccccaatcgctgaaatagagttgggcgtcttgttgctcatgtccgtaaataccggcacctactcctgcatgatcgttgtcccagatagaaccgcaagtgttgttgcccgcatctgtataaataccggctttcattccaagactatgtatatggtcggcaaccggtttcattccattcgggaaacggtttttgttggtctgcatttttccattgccatctcgttcgccgaagaaaccatcatcaatattaatataatgatatcctgcgtctttcagaccttttttaaccatcaggtcggcctgatttttaataatatcttcactgatatctactcggaaggcattccatgaactccaacccataatagggggattgactgctttttcacttccggattgagaaacctgagtttctgtacaactaacacataacaaggaaactaccgctgtggctaaaaggtggaatctgtttttcatgatgtaacaggttgatgaattaatgggattaaataaaatattggtaacaaagatataaatgaatctattggcgtgcaaataaattaaactgaaaatagagaggaatcgaacgaaaaagaatttgattattgaattatctgatggattatcagtacgttaccaaagtgaattaaaacaaaaagcgacaaatgataaaatcatttgtcgcttttgtcggaatgaggcgactcgaacgcccgacccctacgtcccgaacgtagtgcgctaccaactgcgctacattccgctcttggatgtgatgttgttgaaaattgaactttgaaagtttttattcgtaaaactctgattaacattacaatttctatcacattataatcaaataaatagattgtatatatgttaaatgttaacttatattgctcttattttttttgacggtgcaaagatatggaaaaggttcgatttatccaaatactataggaatattttttggaaggaacttcataatgtattcttttataatgataagaacaaagctatatcccgtgtccttctctttagtgctgacttttaagacaaagagtttatctcctaatgagaaactgaaatattcattattagatataccggcaatatgcaaaattgaatatatacggatattagttctagtatatatacaatttaagtacctttcttcctaagagatgtatccaacctgttgcaaaattatataaaatattgtaaatgacaatataaaatataaacttttttttagctaaactattaaaaactaggggatttgcaaaactttgtaatctatacatatttctagttaattcattattcgttgaaattcaattaattacaattatattacagattggaaacttctcttaggaagagatatatttgaaatgtcatttatttatactcatatatataggggtgttgaaaaggtatatgtaacattgatttgatatataacgcatgtctaaaatatttctatttccgatatataggacgaatgtggtttgagatatatgcgtgtatgtgtgaatttagtaatatataatacttatatatatgaaaaaaaacaaattgaaactgtatgcaattatgatttttgtgcttctctgcacagaagtacattgtcagaaagtagcaatcaaaagcaatttattgtatgatgttactgcaactgttaatgcaggaatagaagttggccttgctccgaaatggacatttgatctttccgctaactataatggctggactttttcacatgagcgtaagtggaaacattggcttctgcaaccagaaggacgttattggttttgtgatcgtttcgctggtcattttgttggtgttcatgctttgggtgggcagtataacattggtaatctgaacaatcatatttcgtttcttggaacagatttatctgtgctttctgatcgtcgttatcaaggttggtttgccggtggtggcattgcgtatggttatgcgtggatattgaacaaacgttggaatttggaagcggagttaggtttgggctggatttatactcgctacgacagttatccctgtgcccaatgcggtacaaaaatagccgatggaaaatcgcataattatgttgggcccacaaaagcggcagtcaatctcatatatactttttaaatcacacaaattacggatatgaatagaacaacaaaaatactttgtagtagtttgctattcctactcttgatgataggagcaaaggctcaaacaataatgggcggtaatgtgacagtatctgaccttgccgtgtctcgttcggaagataaattgttcgtatcaatggatattgatgtttcggcattgagtgtaaaaagtaaccgtgaagtgattcttacgcctagactgtcaggagaaggtaatgaactgaacttaccttcggtgatgatagctggtcgcaaccgctattatcatcatctgcgcaatggcttgtgtacggatgatatgatgctttatcaaaaaagcaaagtatctgtggtcaaatatcgtacagtggtaccttatgccgattggatgaaacgtgccacgctcagtacgggcaatgaaacatgcggttgttgcggcgaggcacttgttgatggcaacgagcctctgttggtgcttcagttggagccgaaagaatttgtgcctgcctatgtatacattcgttcgaaagcagaaccaaaaattaatgtattggaaggttcggcttatattgactttcctgtgaaccgaacagaaatccatgagaattatcgtcgtaatccggctgaattacaaaagatacttaatactattgatgcggtgaagaatgatgtggatacacggattatctctgtcagcatcaaaggatatgcttcgcctgaaagtccctattcgaataatgaacgtctggcgatgggacgaacgaaaacattgaaagagtatgtacgcaaacagtacgattttgccgattcactattcattaccgattacgagccggaagattgggcaggactcgaacgttatgtggaaaactcgtatctcgaaaacaaagcaggtattctggcattaatccgcagtaaccaggaaccggatgcaaaagaacgtagcatcaagactgcctttccaaaagattatgcattcttactgaaagaggtttatccggggcttcgtcattcagactatgcagtcaaatatgaagtgcgtacctatactgatatcaacgaaatcaagcgtctgattaaaacacagccacagaagttaagtttgaatgagatgtatcttgccgcacaggatatgaaactggggagtgaagaatataatgaaacattcgaagtcgctgtacgtatgttccctgatgatgaagtggctaatctgaatgctgcaaatgccgcaatggctaggggggatatgaagaatgcggaatattatctgaagaaagctggaaactcaccgcaggctgtttatggtcgggggacatacgctgccttgaagaaggagtttgatatggcagagaaaatgtttactgaagctgcacatagggggctggctgatgcagaggagatgttaaagcaaatagaagagataaaacattaacaggatctaaatataaaaacatagaaattattaattcattcaaagttgcagattatgaaaagaattagcaagtattttttatgcctttttgccgtagttctcacagcaggttgtgctgaggataaactaggtgaaacagaatttgaccctactgtttatgagggagataaggcatacatgacagtacaggtaactatgccgtctgtgcctggttcgcgtagtaatacggttgaaggtggtggcagcaatgttggtgtcgaaatcggtaaagattatgagaacaatgtgaaaagaatgtatgtggtacttgcccgcagcacggataatgcattcattgcttttggtgacatgtcggacaagatgaaacaatccgcaaataaacaggcttatattgggacttccgaaataactaaaacgcaattgtctcagttctataatgatacagaaacaccaactgataaaaaggaagtgaatgtatttatattttgtaacccgacagatgaattggtagaacttattagtaaaactgaatataagaatacgacatggtataatgcaatttgcaagggtgacgatgaggaattaggaaagatatggagcaagaatgaaggtggcagctttctgatgtccaactattccatagctaagcgcttgctccctaatacgatgaatgactggttgttatataatgaagccactccgtttaatctttccggaataaacaatgcgggaagcttgtcacaagtagacaacagtgtaggtggtgcagtgaaagtagaacgcgcaatggcacgtttcgattttagagatggtagtcgcagtttgcctgaaaatatacgtcctcagaaaggcaacacttatccggttgtacaagatattgcgccggacggaacacctggggcttacattgtaaacgttgaattaggtaaaatggctttggtgaatatgaataatagtttttattatttgcgtcgtgtatctgataatggacttccggcacaagctagtctttgcagcccggaaaagccctggtttaccgctgtgggaggtggggaaactcatcttaatggtaattatgtcgtggatgtgtgggcaaccgagaagaatcaaggcattgagactacgaaattaagtgagtattttaattaccctctctttcaacctgacggctcaatagacaatacaaagcaagatcaatggaacacgcatctattatctacggttcttgggggtgaagaagatacagataatagctggaatactggtaacaaatatggtgactatcgtatatggcggtatgtaactgaaaatacaattccgggaccggttgacaggcaggtaaacggtataacaaccggtattgttttcaaaggaaaaatggtagctactgaagctgctgccgctagcactgacgaagataccaggcacttggcagaagttattaattacactgcttctggtttaatgaaggattcttataaagatccgattatttatatgttcggcggcaatttgtatgtaagttggccaaatgtgcgaaaagcagtgaaagctgttgcatacaacgaagagaccaaaacatggagtcgttctcatccgctttatgtggctgtatatggtaccggtggtacaggtgaggaaggggatgctagccctcaagatgaaagtagtgctaattcaaaatggaacacttgggacagaaacgataaaacacttgaaggttcttatctcagtgatttcagacaagcagctactgatgccggcataaccatctatcagtcaagcgaggacaaagacggtggttggggctattattgctactattattattggaatcgccacaatgacaatggtgtggaaggtgaaatggctccgatggagttcgctgtagttcgcaacaatgtttataaacttgctgtaactaacatttcccgtcttgggcatccacgtatttcagataatgaccctgataacccaggtcctgatactcccgatgagcgaggtgatatttatctgacagtttcggtagatgtattgccttgggtagttcgtgtcaataatatcgatttctaagaaaccaaagatgcataataaaaaacgaaatataatttcagggtttatcagtacggtgcttggcatcgtactgataaattttgccttttcatcgtgtgagcgtatctatgaagatcttgctccatgtccgcatggcgtgtcactacgcttcatttacgactacaatatggaatatgccaatgcatttgctaagaaggtggattgtctgacattgctggtctatgatgaaaatggcaattatgtggatactcgcatagtgacgggtacggagttgcaggacgagaactatcgcatgaagctggacctcaaacaaggaaattatcatttcgtagcttatggtggtctggcttgtaataagagctctttccttatgaagtatacccccggagaaggaactggatataccgatttgcaagtggaactagattcggaatgcttgacaaatcctaaacgaaagaacttgcacggtttgtattggggtgaacttactctcgctactgccgacctttacagtgaaggcactgttgagatgatgaagaacaccaataatattcgtgttgtgttgcaacaaatgaatggtgagccggtagatgataagaaatttgaatttgaaattaccgatgataatatactgttcagttacgataataatttgcttgagaatggtatggtgacatacactccatgggcacaagggcaagcttcggcaggattcactgatgagggaagagaagtggtggtagcttatgccgaactatctacttcacggttgatggtgcgtgattggtactcgcctaagctgacggtgcgtcgcaaagcagatggtgtggaaattatcaatattccacttattaactatttgcttatgcttaagagtgatctgtatgcaagcatggattcgcaggagttccttgatcgtgaaagtgaatggtcaatgatattcttcttaagcccgaatcttgaatggattaaaacttatattaagataaacgattggactgtcagaatcaacgatataggacaatgaagaaaatcgcatatatcattataccatgggctatttctctcctttttcgggggtgtgctcatgatgcagatagtgaaatgtttgacagggaagtgccgttagtgaatcttaatatcagtgttgccctgtctgacatatcgcaatcgggtacacgggccagtgacatctatccagaggctccagtaaatgataatgaaaagatgaaaacgttgcgtattattgtcgtacgtaacaatgataatatagtggaacataaccggatttacaatttggaggttgcatctaccgattgttatagcgagccgatgaaagttatcggaaacgaaaagaaacgaatttatttgtttgcaaatgaagctacggaaataaagacaacgggattttttccgaaacgtaaattggtagagtgtgattttgagaaaattcagcccggaagcttattctttacggattatatatccagtctgaccattcggttaggcagtaatatggagcgaatcgacggtccgttgccgatgagtggactttatatggtagatgtgcctgccgaggattgtgaacgtgagctttccataatgagagcggctgttaaatttactttcaatataacgaataaaagcagtcggtccatagaaatcacgaaactgactattgataaaatggcagaaagggagtattacttgccacacaatgctacatatatagagagagaaacgacggagggaacaaagttctgggacataaatagtttcgatgttcctactttgaaagggtattatacatacgatgcgtcatcgttgtttaaagggcaactgcttccgggagatgaaaatacgaaaaccaatgagcaaccgatttacctgttggaggggaagcatagtgatgacaacaataaggaaaatccttatctgctgactttgggtgtcaacggaactgaattgaaaagttacttgccaaatctgccacagttgccgcgaaatacacatgtggtggtaaatatcacaattaatgaacatgcaatggattgcatagtagatgtgcgtccttataccgaaatcacactagaacccgatttcgggttataaaaaaagaaaggaaagatttccttaaataactttatacaggaaaatatgaaacgcaacattatttatagtcttacaggtatgctgatatttgtcttgactgcctgtacggatgattggctgaacaacgaaggcgaaagaatgccggaaggagaagtcagtgtgagtgctactgtagagtttcttcctcttcggccggctctggatgtaaacactcgtacggcaggagatgtaatcaaagacatcaatgatctttgtgtgttgctgtatgatgaggaaggaaatctggtgaaatcgtactatcttcttccgaaaggtactgcttcaacggaaactacagatagattcgatgttgatgatattgaccgtgcagacacagatgcggaaggaggcaaaacggcggaagccaaaaccaaacgggctaccttcaagttagctcaagttccttacggctattattatatgtatgcggtagcaaatatgggtaacttggctgagttagaaaaagataatatacaaacagtcgataaactgaaatcgattaatctgacatgggaagcagaaaactggttcgcgacagaagaaactgctgatggaaaagtgacaagagctactaaaaaccatcagatgtttggctacttcacaacaaaagagaatgcacctgcgggggctaaccgcaatacggaagcttcacgagtagctataaataagaaagatatggaattgcacgcatggattcgccgcgcagcttccaaagtaaccattgcttatgatgccactggattgaaagaaggagtttttatttatttgaaatcggttcagataaaggatattcctgttaattgctacttgggaaaaacaaacacaccaagtgaagatgaacaatcgtctttaataaaagacggagaaatcataaagtattatacaggaactaccccacctgcatttgacgaattttatccggtacgtttagctacggggagagcttattacccgtgtgaagagaatggaacttttaaatatggacacgaagaggcagctgatgctttgtttttctatgagaatatgcagggggaccagccatatgataaacgccaggatgcagatggagataaagaactggatcatcccggattacctcctcatctgcaacagccggacaaagattattcaaaatatagaccaaaagataacgtaccttatggtacatatattgaagtagacgcttattatcgttctattaatgaagaaaaagtaggtagtggtgatattaaataccgttttatgcttggtaaaaacattacaacaaactatgatgccgaacgtaatcatcactataaacttacattgaaatttaaaaattttgcaaatgatgcagactggcatatcgaatatgctgaaccggaaccaggtattgaggtgcccaatccctattatatttcctatttatataacagaacgatggatttgcctataaaaataaatcctggttatgcgaaagtggaaagtgtgaaagcggaaatactcaacaatggttgggcgcctattggtgcagatgctaataattttgattattatcattttgatttggaaggcaagaatgtatggaatggatttctttctttgcgccgtactactgcaaccatacttacgacaacaaaagcagatgctaatgaggattcaggtattgtttatgcagaaagcaaccaggaatactataaccgaactcaacgaggaaatcgcgaatatgccgtagatccaggcattcacgaagatactgaatatggtaattattctgtgcgtaaagaagaggggacgaatatacttcatatgagtatacctttatatacacgtgcgaaacagatgattgcaaaaactagttataccgggaataatccatatgtagcctaccggcgtcaggcaaaaataaaaataaccgcgactttatcgcagggtgagccattaacagaaatagttgatatattccaggtacgtcgcgtagtcaatcctaaaggaatatatcgacggcataataatgacaagcctttccatgttgttttaaaacgtttggcacgggagaatgctacaaatttcgaagaatttacttccgagggggcttgggaagctgttgttgcagcgacaacgcacgaaggatttgtgaagttagaaaaaagtagtagtaacaagtacacgagtatagatgaacatggtacacttaaggggctttccggttcagtaattgatttcaaaattacgttcaatggtacatgtgcagaaaatgaatcccgccatgccgttattcgtgtcagttatcacaacaatacttgcaatcaccttatatttgtccgccagggctatgctcctgtagctttgcttgacgaagggcgggcttggcatacgtttaatatgaagactcctacggaggaaacagattcgccggtagaagaagggtcattgtttaagtggggaaatctgaatgaaccaattgatgcgtcaagtaataaacatgagaaagaatattggatagaagtgcagccgaaagactttaaagatgataaagccaagccactagagattgctggaaaagggactactaaattgtgggatgaaatcacatctcagccttttaataccccttttgaaaagcctaaaattaatggaaaagaagtggaaattgccaattacgatgattataatgtattgtataaaagcaaggatatagaaatgggctatggtgtactctatggtgatgatgccgaggaaacactttccaatatcaatgaagtatacggatatcgttatgatagtttcggcacatatggtatgcgtggttgttttatatataataaaacggatgggcggaatctattctttccgataggagcgtcaggctatggacatagaaaacaaggatatggtgatatgaaaaattggcagggcgtagttactggtcagggctatatacatggtgagacaaagaatacagttgtactccgttattctgctggacgtagtgataaattcaatatgacggcaggtgatgagaaacctttgttttatgatttgtatatgcgtccgggggctatctattggttacagcagatatatccaccagggcgcgatggagaaagtgatattatggcgtgggatattaattacttctcttttgattttaatttgatttctaaaagtaatgtttacgcaactcttactggtgaaaataaaatagaaacgcctaaaagtgatgcatgctttatccgttgtgtagagccatgataatcttatttattaataatgtagcattggaaaactaagggctgacttttgggtcagccccgtcaatactcttttggtatactataatgatttaagtataatactgtttgctttatctactatggaggcgtctaacgaggctagataaatacgtgttgtgttttcggagtcatgtcccatagcttcgctaataaccgagatagagatatttttactcttggcaatgtttgcccatgcatggcgcgcgacatatgttgttagtgtgacggggatctctaacatttgtcctattaccttcagctttctattaatcaaatgtgaggcttttttatattctcttcttgggtctttaccgttgtttttgatgataggtagtagataagagctttctatagtgttatatttatcgacaattttttgcatgggcttttcccacttaatgaacaattgttggtcggttttatgtctgcgataggacagaactccattctgcagatctttctttttcagatatgccatgtcaatgaacgacattccgcgggtgtagaacgagaacatgaagatgtctcttgcataatccatcaaagggtttgtgctcagatctaaattttgtatttggcgaattgtttttagagatacagctcgttttactgttttgtcaataccggtatacacatacttgaacggatattgttgttgtgttaactctttttctacagcacgattgtatattgctcggagattccgcatataatatgaacagctgtttggacagacaccgcagtttttaaggtatatttcatattttatcatcagattggaatttacatcttcaagtagaacgtcaccattattgtccataaaacgcttgaaactgttgtatgctgaggcataagactcggcagtgcgttctttgccgatttgttttagttgtataataagatcttgtgcgaatgatagaaaactgtatttattgatggggggaatacggaatagctctattatttttccggaggtaaaaggattgcccgaatgttcaagttttgaaatgatatttttcagtctatgcatgtcttctgctattcggcttgttagttgagcgagaaaacgtcgtcttatgtcattattgtccggaagaatgatgcaagccaaatgcttatcccattctgaaggaaaaattttatagccggtattgatttgcctggttactctggcatgaatgatttgatagaacaatacgccttcttttgttttcacggaagaggtacggaatttgatttttattgttgccatatctacatgatttgttatattaaactataaataaatgaatataacaaatgagcatttatctgtctttttataaaattaatcctttgtcatacagaaaaaatgcctgatggaaacatttttatttatcattcatttaggataatagaaaacatatttgctatagaaaaagtttgttcattaaatgaattttaaagtgggcgaaaagctgttgcttaacatgagataatgattgaataaatgctgtaccaaaatcaattgcagaatggtatcatatttatgttgattctcattcctattggttttacctgttccagaaaaagaaaaatccctgaattttgaaaaaaatcagggattaatattgtcttgctttttaaaaggtggtgccaccaggaatcgaaccggggacacaaggattttcagtcctttgctctaccaactgagctatggcacctttctcgtttgcgggtgcaaagataagtatattttttaatactgcaataacttagagagaatttttcgtctacttagggagaaagaaaaaaaacttttctttctaggtagaataaatatgcaaatgtagtatcatttattcggtatattttatacttttacgagtcaaaacgatcagggcactacaaacaatagaatatattattatggcattacagtttgttacagttgttttattagctggattcatttatctactgattaagtatcagtcggttaagaagaaaatgatattggaaacatctgtaatgctgcatgaatccaaagagttgacttccatactacagaatataaacgtttactatctgttgattgacagagacctcatcgtccacaataccaattattatacactgaatcatttgactcctgcgcagggagaagaaaaaagagtcggagatttattgcattgcagaaatgcgatagtagccggagaatgcgggaaacatgaacagtgtaagttgtgctgtatacgtacatctataagcaaggctttttatgagaagagaagctttaagaaactggatgcctctatgcaacttttaagtgaggatgaaaagacggttattccctgtgatgtttctgtttcgggcacttatctgaaaataaatggtgaagaacgtatggtgctgacagtctatgatgtgacggaacttcgaaatatgcagcgcctgctggatgtagaaagagaaaatgcgatttctgccgacaaacttaagtctgcctttatcgctaatatgagtcacgaagtccgtactccgttgaatgccattatcggattctctgggttgatggctacggctaccagcgaggaggaaaagaagatgtataccgatattatctctgaaaataatgagcggttattgcgactggtaaatgatatcttcgatctttcgcaaatagatgcaggcgtgttgaactttgtatattcggagtttgatgccaatgatctgctgagggagctggaaggacttttcggaatgaggctgaatgagaatcctttggtgacactggtctgtgaagcacatctggaaccgattatgatgcattcggagaagcagcgtattattcaggtattgacgaacttgcttcataatgcgatgaaatttactaaaacaggtgaaatccgtttcggatgtcgtatggaaggcacggatgaagtctatttttatgtatcggataccggtatcggcattccgaaggaggagcaggaaaagatattctcccgttttacgaagcttgatcgggagatgcagggaacagggcttggactgacactttcgcaaacaattgttcataatcttgggggaagattcggtgtagaatcggaagtcggtaagggtagtacttttttgttcatcttgcctttggttacgaagaaagaaataacaaatgataagatatgaataatcccaccttgaatcaggaaatattcaaggtgggattatttatgtaaacaatatgtttagcttttaagatttaggtgcacccgcatctttaattccggaatctggcgatccgttgcttgctgcggtatttccaccggaaggagctggattgcttgtcggagtagaaccggaggttgtagagcctgcgcttgccggaccggaagttggggtacttgctggtctggcagtagcggaactgaccggacttgcagacgatgtcgaagcagaagccggacgagcggcatttgcactgttggcagtaacaccgacagtaacagcctgaggctgaacttcccaatggaacggctcgaaattagagtttggatctacccaagacggtttcttggatgcgtagatgataaacggagcaacgactacgatcaatgcaccgatgatcaatacggagaaccaaacggtattgctaccggtagaaatctggctgggcgggataaagctcagaatgaatgcgagcaatgaaccacagaagccaagaccaccaatgaaccacattaaaccgttaccggatttaccgatacggaacggacgattcaatttcttcatcttataacgcagtgcgatagctccggagaacatcaacagatacataatcagataaagaatcactgtcagctgtgacagaatctgatagaaactctgtacggaaggcataacgacgaacaacaaactcagtacagtcacagcgataccctgcacgaacaagatattcttctgtacacccagtttgtttgttttctggaagaacggaggcatataacctgctttacctacggcaaagataccttttgacggacctgcaacccatgtcagcacacctgccaacactccgaatgcaagagcgatagcgatgatcggtgacaaccaggaagcgtgaatgtatctgaaatagttatcgaaaccgacgagcagactctgagttaagttaatatccttagcagggatgataacgcccaatgcgaaggttcccaatacgaagataagaacagtgatcagcgcaccgataaatacggctttcggatagttcttggaagggttctctacgtcttttacgtggataccgcccatttccataccggcataaaacaggaagatactggcagcaaggacgacgttatcgaagttggtaaagtcagggaagaagctgctgtggaaatccatattggattgtcctccagttgccagatagataatacctaatataatcagcaaagcggccggaataatcgtacccaccataccaccgattttggctaccttaccaacccagctcatacctttcagagaaatgaatgtagccagccagtagatgataagaactacgacgagggtgtaatacttgttgtttgccagcgacatatcatgtacgtcgttcattccgatgaaggcgatggatacggcaccgaatgtcaatacggtaggataccagatcgtactttcgatccattgtacccagatggcgaggaatcccagtttcttgccgtaggcttcgcctacccaccggaacacaccaccttgcttatcctgaaacatagctgccagttcagctgctacgagcgatgtcgggataaggaagacaatcgccgcgaaaagatagtagaaggccgaactcattccgtatacggcctcggctggtagcccacgcaatgatactactgccgtaacgttcatgatagccagggtaaacacgcccagcttcactgcatttttaatatttgccataagttaaggttttaagtgaaaaatattttaaagtcagtgttataacaacattttgcgtgagatgtttccgcaatctctttcaaagttcgttaattaacatcaccggatggctcaattgtaaacctccggacgcctgttccgaaacaatcgctttctcagattgtttctaagcattataagttacataagaatcattttattataaattaagtagttatgaaatcagcgctttccgattttattctggggaaaaaggggatttatggcattctccacattattatattgttaatgtccctttttctggttattagtatttcgatcgatacgtttaaggggattcctttttatacacagtcctcgtacatgaagatccagttgtggatttgcatctggttcctgttcgattttgtactggagttttttctggcaaagcataagtggcgttatatacggacgcactttatctttttgctggtggcgatcccttatcagaacatcattgcgtattacgggtggaccttttctcccgaagtcacttacctgctccggtttattcctttgctgagagggggatacgcattggccatcgtagtgggctggctcacctataaccgggcttccagcctgttcgtctcctatctgacgatgttgctggcaacggtctatttcgccagccttgccttctttgtccttgaacataaagtgaatccgttggtcacggattatggagacgctttgtggtgggcatttatggatgtgactaccgtcgggtcgaatataatcgcgatgacgaccaccggaagagtactctccgtactgctggcagctttgggaatgatgatgttcccgatctttacagtctatattacgaatctgattcagcagtctaatcaaaagaaaaagcagtattatgcggaagaggaagaaaagacggcgtctgcataggggacataatccttttttataaggtcagactcatatccgtatcgatttgtattgggatgatacacagtgcgatatgagtctctatattctcaacgtgttctcatacctttgagaaaaaattctcaccacaatgagaaaaaatactcatgcctttgagaaaatattctcatacctttgagaaatttttctcaaaggtatgagaatattagtgttcaagtacattgtttttttgaatagagtacttaaggaaaatagaagtaagatattgatagtagaaaaggttactatccctttgaaggatagcaaccttttgtttttctcatagagcggataaactagtcgactacgatcaagtgattgtcactgaatacattcagtcccagtttattcatgacatattggatagccaattgtgcttttaccgaattgcctgcaccatccaaaggaggagcgaatgcggcaataccgaactgcccgggcaatacgcccattacaccaccgcctacaccggttttagccggaatgccggaggtatacatccagtctcctgtatgctcgtagaaacctacggcagcgatcattgcagtgatcttgggagcgaggctggcatcgaatacttctttctttgtcaccggattcacaccaccgttggcgattgttccggctgccacagaaagctgcaaggccgttactcccaatgagcattggcgggtatacaggtccagcgccatatccggatcatcatagatacggttgtagttcttcagcaaccacgcaatggaacggttgttaaagttcgtatccgattcggatttgtacaattcatcaatcagttggggagcactgccgcataaatcggtcacgttctctacgatggcatcccacttcttggcagagtcgccgataggttttaccatactgcaggctgagatggcgccggcgtttaccaatggagtagacgggtggtcattttccagcaggatagcgatgattgaattgaaaggcaggcccgttgcgtcagctccgatcttgtctaatatttctttggcaccatattggcgcagtgcaaggatggccgtatgtactttggatacggattcgatgccgaagcggtagtcagtatctcccacatggatggtctgcccgttgagcaggcagacactgattccaaagagatctttgttgacattggccagataagggatatagtcggcattcttaccgcctgtattcgttttcacctgatcgtatgcctcctgtaccacttctttcaattgagcgagtgttacttttttgtccatagatcaatttatttttttacggttttatgacgacgaccaccgtgattgaacatcttggcttctaccggaagatttttttcctgagccatgcgggtaggagtcgggaaatcaagtttttccagttcggcaattgcattcttgatatcacccagcaacatatctgccatatcgcggctgaatccctggcgaacaactacacgcattactacataatcttccaatttggaaggcaatgtataagccggaaccatccagccgtgctgagacagtttatcctgcaaatcgtacaatgtccacttggcactctttgcatattccggtttcagataccagatgaacaatgggttcactacattttcggagtagttgacgaacggagccatcttggcgatttcaccgtggatgtatttggcaatctgcaaagaattatattgtacttccttgtaaccttggaatcccaaacggatgaattgataatattgtcccagaatctgagcggcaggacgagagaagttcaagccgacctgagtaatgttggcacccagatagttgacgctgaatgacatttcttcgggcagatattctttgcctttccagcaaacccagccaagtcccggatataccagaccgaacttatgaccggatacactgatagaaagtacccatttcagacggaaatcccacttcgtatccggatagaggaacggaagaatgaaaccaccactggcggcatctacgtggataggaatgtcataacctgttttggcgttgtaagcatcgagagctttgtccagtgcttcaacgtcatcgttcagtcctgtccatgtaacaccttggataggtacaacacagatagtgttttcatcacacatcttcagcgcttcttcggggtcgagagtggtcttttcaagagtcaaaggcacttcacgcatttcgatctgccacagttgcgcgaacttttcccatacaacctggaaacctgttgagataacgaagttaggtttgtcaaacggtttaccttgagcttgtcttttcttacgccagcgcaaccatgcagctacaccgcccagcatacaagcttcggaagaaccgattgccaacgcaccggttttccatgtatctttttccggagagttccacaagttggcgacgatgttgatacatttaccattcattacggcgatacgaggatattcggtttcatcaatatagttgatgttgattgcctcattcatcagcttggtagcgtaatcgtccatataggtggttacgaaagtagctaagttcaagcgtggctgagtttgggcaaatgtttcatctttaaccatctggtaagcgacttcaggggtggttggtccatcaggaattctttctactggagagggttgtaacattctgtctgaaccgaatacgtcggtttttgcatcaccttttctgaaatttaaatcttccatactaatttgtttttttaaaggtttagggcgatggggattttccccgtcgaatttccctcaacaacagcagatggttttgaaagttttcggcttttacattatttggcgtttattaaggggcggctttggggcaggcgtaaggcggtgggaacggaaataaaaaaggcaagaaggggttgtttccctcttgcctttggctatttgctgacaactggcagcttatagttatctgatacctattgaattgtgttgttaaggtttagcggaagtccttcagttcttcctgcagtttttggcgggtgaagaatatgcggctctttatcgtacctaacggcaggttcagcttttccgcgatttcgcggtacttgaagccggaaacatgcatggcaaacggcactctgtattctttgggtaatgaattgactacacggtgcatctctttcaggtcataggctttttcggtgctttcaaaccctgtgtcctgcggtaaattcaggtggtaaaggttgtccgtccggtcaatgaatgtctggtcacgaactactttgcggtagttgttgataaagatattgcgcatgatggtatacatccatcctttaaaatttgtgtcaggcatatatttatcttcattgtctaatgcttttaatgatgtttcctgcaacaaatcgtttgcttcttcgcggtcggttgtcagcttataagcgaaacggagtaattcgtcctgtactcctactaaatcttttctgaagcttacacttttcatatacgttgctttttaaattgtgaatattcgttgttaaatttcgatgatgcaagtttacgggatttttttaagtacggcaggggtaaaactgacggaatttaacctaaaaactgtctacggatagtttttaggtcataatctgatagtttttgggtgtttttcacccgttttttgaatattcactgttgtctcatttgaactttataaggtaatcattgttttcatcagacctaaacttttaacgaaccggtatatgaaaatacaaactgggaggggaacaatacctcttatcactttaatagctatctggtctatctcggcattgacctctttgccggggctggctgtttcgcctatattgggcgaccttaccaaaatttttccgaaagcgaccgacctggatattcagatgttgacttcgctgccatcgttgttgattatcccttttatccttttgggcggtaaactcaccgaaaaggtcgattttgtccgtatcctgaaaatcggactctggctctttgcagcaagcggtatcttgtatctgatctccaacaaaatgtggcagttgatcgttgtgagtgccctgctgggcatcggctccggactgattattcctctgtccacggggttaatctcaaaatattttgtgggtacttatcgggtgaaacaattcggattgagttctgccattaccaattttacattggtgatagctactgccgtgactggatatctggcggaagtcagctggcatttgccgtttttggtctatctgctcccgttgatttctattctgttggttggtcacttaaaagaaagtcggtctgacgctgccgtcgaaccttcttctcaaagtaccgcgccatccggacaaacggctgccgtagataccggaggaagtaaatatggaatccatatcaagcatctgcttcagatcatgcttttctacggagtgacgacttttattgtgctggcagtcatattcaacctttctttcctgatggagaaacaccatttctccagtggcaattcgggactgatgatctcgcttttctttttagcgattatggctccgggtttctgtctggacaagatagtggatgaactgaaagaacgtaccaaagcatacagcctcctgtctatggctgtggggctggcgctgatctggattgccccgatcgaatggctgattattccgggatgtatcctggtcggtttgggatatggcattattcagcctatgctgtatgataaaacgacgcatacggcactgcctcaaaaggcgacaatggcattggcttttgtgatgatgatgaattatctcgccatcttgctctatccttttattatagattttctccaaaatctgtttcatacccagtcgcaagagtttccttttgtcttcaacttgttgataactattgtcacattcttctgggcttacctgcgccgcgatacctttttgtttaatgatcaactgaaataaaaaaagatgaagaataagaaactggaagccaatctgagtatggctgtatcaaaaatattcagcggtttgaatatgaatgccctgaagtatctgcttcccctatggatgagcccgttgacaggtgcgacacttcgttgcacctttgccgccgctgcattttggatgatcggatggttcatgccgccagaaaagtcatccgccaaagacaaatggctgcttttcctgttaggggcattcggactgtacggctttatgtttctttatctggcggggttgagtaaaacgactcctgtatccagttccatatttaccagtctgcagcctatctgggtgtttctgattatgattttcttttataaggagaaggcgacatggaagaagattctcggaatctccatcggactggtcggtgcactggtctgcatcctgacccaacagagcgatgatttggcctccgatgctttcatgggaaatatgctttgtctgatcagttctgtcgtttatgctgtctatctgattttgagtcagcgcatcctttcttctatcggagcgatgactatgttgagatatacattttccggtgcggcggtctccgctattatcgtgacatttattacgggatttgatgcgccggtgttctctatgccgttccattggacacctttcctgatattgatgtttgtactcatatttccgacaacgatcagctatatgttgcttccggtcggtctgaagtatctgaaaacaacagtcgtcgcgatctacggttatctgattctgattgttgcgaccattgcctctctggctctcggacaggaccgttttagctggacgcagacgtgtgccatcatttttatttgtatcggtgtttatctggttgaggtggccgaaagcaaagacaagtcgccggaccccttgaagaaataatcatatataatgtatgatatgaaaaaaagcgggcgcccttctcagggtgcccgctcacttatgtcgtcatcatgttttatagagaggagctgattgcttgcgcaatggatttaaattcttcatccgataatttcagcttcggattggagaacaacatatccgattccttctgaataggaattaagtggatatgggcatgcggtacttccaggccgataaccgcttcgcctacctttttacaagggaaggctttttcgatggcacgggctatcttctttgcgaatacgtgcattgctgcgaggtcttcgtcacttaaatcgaagatgtagtctacttcctgtttggggactaccagcgtatgtccctttaccaatggattgatatcaagaaaagcaaaaaaacgatcgttttccgctatcttgtagcaaggaatttcgcctgcgatgattctactgaatattgttgccataatctttgatagataaaagaaggcaagcctcacacggagacctgcctttctgttaaattgatatgtttactacttctaatgcaattttaccctgtggtacggtaatttctgcaatatcacctactttcttgccaagcagaccttgtgcaatcggggtgtttacggaaatcttgccttctttcaggttagcttcgctttcggaaacgatggtataagtcatcttcatgccattcttgacgttcttcagctccactttgttcagaatctgtacagagtctgtctttagtttggactcgtcgatgatcttggcatctgcaatgaccgttttcaatttgttgatgcgcatttcaagcatcccctgtgcttctttggctgcatcatattctgcattttccgacaagtcgcctttatcccttgcttcggctatagccgcagagattttggggcgttccactgtttccagttcctttaattctgccattaactttttgtaaccttcttctgacatataagccatgatgtttttcctccttttatttaaaatggtcatataaacaaaaaagaattccaacatggcacatgttggaaccctctcttcaattatttctctgcaaagatagacttttaagtgatatctgtcaagtgaaaaatgatgctatgtaacatatttaaatgaaatatgctaaattataacaacttagagtaatgacttgacggatgcttcgaggtctttgatgtcttcgccgcggagcttcagttcgttgttccggttgatcaggaagatggatggaacctgacgaacattatatacagctacgttggtcgagtagacaccgttgccgtcacgtacgcaaacccaaggcaggttgcctgctgcggttttccagtagtgctcgtctgcgtcgagagatacctggtagatttccagcccatcctttgcgtatttattatatagttcgcgaagcatcatattgtgaggcgctcctgccggtgactggaatacggagaaatccagcagcactactttccctttcaggtcggtcagtttgcgggtatttcctttcacgtcacgcagggcgatgtcgataataccggtctcgatgatcttgtcctgtggaatttccagagacttgctctgtggctgacgggtatttttcatccctttgattacgatattatatagattttttgaacgtacagcatccggatatgtattgttgaggctggtagcgacagctgcaaaacattttacatcgtccttgttgttcagcggatcgaagatcagatagtcattcagcttttggaacagggcgaagtaagcggctgccgtgttgggagctgcgaatatataattcactttgacgtcctccttatagttcttcagcagtgttgcgaggttctcttcaaacgtatcgtgtcccagtttgttggcacgcagcgcattcagttgctcgtccacattcttttgaagattgatttgtttcagcgtcagttcctttatcttactgctgttttcagatccttctaccgtgtaggcggtagagaaatcaacgtatggagcgttgatctgtagcgtttcgatagaatccacagaaaagttgatgactttgttgtccacccgcaagcgataaaactcgggtgattcggggcggggttgtttaaacttgaatgtaccttctcctttcaatttaaccgaatcaagcggaacaataccttccagaccggaagcttcgagataaagcattttcccgtcggcccctgatatgtctccgttcacttcaaactcaggaccggaactacaagctgtaatggtaagtgcggcaagcgctacaaaagttatctttttcatatctcgtgtgttttttaagagttgcaaatatacgtcttttcgagattactcaaagctttttgcctgcttcttcacctctattttgcaaaaaaaacatatagcatctaactttttagctcatttccacctgattacaacgagaaatgtatatctttgcaggaattttgaaagaaaagtatagataaaacaatttttatgattaacccaattgttaagacgatcgagttacctgatggaagaaccatcacactcgagacgggaaagttggcaaaacaggcagacggttctgtaatgctacgcatgggaaacaccatgttattagctactgtttgtgccgctaaagatgcagttcccggaacagatttcatgcctttgcaggtagagtataaagaaaaatttgcggcattcggccgttttcctggtggcttcaccaagagagaaggtagagcttccgattatgagattttgacttgtcgtctcgttgaccgcgctctccgcccactattccctgataattatcacgcagaagtatatgtaaatatcatccttttctctgctgacggtgtagatatgccggacgcactggccggattggcagcttctgcagcactcgctgtttcagatattcctttcaacggaccgatctcggaagtacgtgtagcacgtatcgacggtcagtttgtaatcaatcctacttttgaccaactggaaaaagctgatatggacctgatggttgccgctacttatgataacatcatgatggtagaaggcgaaatgcacgaagtatctgaagctgaactgctggaagcaatgaaggtagctcacgaagttatcaaagtgcattgcaaggctcagatggagctgactgaagaagtaggcaagacagtgaaacgtgaatataaccatgaagtaaacgatgaagaattgcgtaaggcagttcgtgaggcttgttatgacaaggcttatgcagtagctgcttccggaaataacaacaagcacgaacgtttcgatgcttttgatgctatccgcgaagagttcaaggctcagttctctgaagaagaacttgaagaaaaagctccgctgatcgaccgttactatcatgatgtagaaaaagaagcgatgcgtcgttcaattcttgacgaaggcaagcgcctggatggtcgtaagactactgaaatccgcccgatctggtgtgaggttggtcctctgcccggtcctcacggatctgctattttcactcgtggtgaaactcagtctctgacttctgtcactttgggtacgaagctcgacgaaaagattatcgacaatgtattggaacacggaaaagaacgtttcctgctgcactataacttccctcctttctctacaggtgaagcaaaagctcaacgtggtgtaggccgtcgtgaaatcggtcacggtcacttggcttggcgtgccttgaaaggacagattcctgctgactatccgtacgtagtacgtgttgtttcggaaatcctcgaatctaacggttcttcttctatggctaccgtatgtgccggaacattggcattgatggatgccggtgtgaagatcaagaagccggtatcgggtattgctatgggactgatcaagaatccgggcgaagaaaaatatgctgtattgtctgacatcctcggtgacgaagaccacctcggagatatggacttcaaggtaaccggaacaagagacggtatcactgctactcagatggatatcaaggtagacggtctgtcttacgaaattctggaacgtgctttgaaccaggctaaagaaggacgtatgcacatcctcgacaagatcaccgagacaatcgctgaaccgcgtgctgacctgaaagaccatgctcctcgcattgaaacaatgactattcctaaagaatttatcggagctgtaatcggccctggtggaaaaatcattcaaggtatgcaggaagagaccggtgctgttatcactatcgaagaaacagacggtatgggacgcatcgaagtttccggaaccaacaagaaatgtattgatgatgcaatgcgcatgatcaaagcaatcgttgctgttcctgaagtaggcgaagtatataaaggtaaagttcgttctatcatgccttacggtgcattcattgaattcctgccgggtaaagacggtttgctgcacatttccgagatcgactggaaacgtctggaaacagtggaagaagccggaatcaaggaaggtgatgagatcgaagtgaaactgatcgacatcgatccgaagacaggaaaattcaaactttcaagaaaagtattgatgccaagaccggaaaagaagtaaaaaagcagatagcttttagataatgtgatagcccgattactcagtattcgggctattttttttgtctattattttgcttttctgcgaaaatatgtgttcttttgtacgaactaatgaaaatagcctgtaaatcttatgcgtgatgcaccaaacgaacaacatatcttctattcaacttttttctgaattctttcatgagaatcaagagaagtttttgtcgtttgcctattcttatataagagacaggcaggaggcggaagatatattgatggagtcaatgattactctgtgggaaaacagggataagtgggaagaagattccaatctgcacggtctgctgctgactatcatcaaaaacaaagcgctcaactatctggcacatctgcaggtgcgtcttcgggccgaagaagagataaatagccatagccagcgggaactggacctgagaatctctacactggaagcctgcgaaccggatgcgatctttgattcggaaatacagcatatcgtacagaaagcattgaaacgtatgccgaaccaaagccggcagatttttatattgagccgttatcaaaatactccgaacaaaaagatagcggaacaactcggcatttccgtcaaaagtgtggagttccacatcaccaaagcattgaaaattctgcgtaccgaactgaaagattacctggtttctattcttttttaaaaataatcgcatttttcgttagggttgttcaaggctgacctgttttatatatagaagggagagaaaaagcctttctataaatataaataggaaaagccaatatctatgaaccaggatttactacataaatattttaagggcgagacttctgtcgacgaagaaaaacgcattcttaactgggtggacgaatcggaagaaaaccggaagacattgcagaaagaacgtatgctgtttgacatcgccctttttactgactctaagagaaaaatgagagagaaagcaggcgcgggcgctcgcatcattcccatgttaaggtggagtgcccgtatagctgctgctgtaattgtagctgtcagttgtggatttctgattaatgaatatcagtatgataaattggcacagttgcagacggtcactgttcctgccggtcaacgggcacagattacgctggcggacggaaccaaagtctggctgaattctgaatcgacgctgagctacagatctgacttcgggcgccgcgacagagatgtggaactggacggagaggcttatttcgaagtagcgaagaataaggagatacctttctacgtaaatacggagaccaatcaggtcagagtggtaggcactcatttcaacgtctgcgcttataaaggaagcaatgaatttgagactaccttggtagagggcatcgttgatatttacgcttatgacaatgaacgtccgctgacccgcctgactaagaatgaattcttcggttcctatcaggggaaatataaaaaagccgttctgccttcttatgattatctgcgctggcgggaaggtctgtattgcttcgacgattctcctttcagttgcatcctcaccaagctggagaaatattataatgtgaagatcaccgtagagaatccgaaagtgctgaattatcgctgtacgggcaagttcaaggaacaggacggcgttgaacacattctcaaggttatccagaaagatcacccgtttacttattcgatcagtgaagaaggagacagcatccggatagaataaagccagaataaaaattaagatgaataactgagctcaatgatatacaccttaaattagtactaaccctttaaaagcataatgattatgaataacagtcaataagtataccccttaccgaaaaagaatcggaaagtacccccatacttcccgattcgaaacagtcaaaaatcgaccttaatcaatttattaacttaacacgttgcaaagatatgagaaaaatttctttgaaagggcttttttgcccaaaaagtttagaatctaagcaaataatactgactatgaagatcacattattccttcttctgttcgtaacattccaggcttattgtgagaatggatactctcagagtgctaaaataagcattccgcgttcgactctgaaagtaagcgaattgcttacccagattgagtctcagaccgactatttgtttgtctacaataaaaaaagtgtcgataccaagcgggtagttaatgtagatgctaccaatcagccggtatccgaaatactcgataaggcttttgaaggaacaggtatccattatgtggtggaaggcaataatatcgtgctgaccaagaacataacggaacatgcatccacacagcaacagaaacaaattacggtgaaaggtgtcgtgaccgacatgagaggcgagcctatcattggcgccagtgtcgtggaaaaaggtacgacgaatggtacaatcaccgatttggacggtaactttactttgaaagtgccaagcgacgctatcattaatatcacctatgtaggttaccaaccgcagagcctctctgtcagcggacaaaccactttcaagatcaagatggaagaagagtcgatggcactggagcaggtagtggtaactgctatgggtatcaagaaaaaagccgcctcgctgacttattctacccaacagctcggaggcgacgaactgacccgtgccaaagaccccaacatgattgccgcccttgccggaaaatcggcaggtgtgcagatcagcaagagtgcttccggtctgggaggttcggccaaagtatctatccgtggtatccgttcggccaacgaagacggaaataaccagccgttgtatgtgattgacggtgtgcctatgctcaatagcaccacagaatccgtatctactgttatgggtggtaagaatgacggtgtcaaccgtgatgcaggtgacggtatctccaatctgaatccggatgatattgaaagtatgagtattctgaaaggtgcctctgctgctgcattgtacggttcgcaggcagccaacggtgtgattcttattacgactaagaaaggtaaagcaggaatccagagaattacttactcatccggtctgacagttgatcatgcgatcagtttgccggaatttcaaaatagttatggagcgaaagccggttcaagctggggagaaaaggaaaatgtgaaggactatgataatgccggaaactggttcagcaatggagtgaccgctatcaactcggtttctgtgatgactggtaatgagaaattgcagacttacttctcttatgccaacacgaccgccaaaggtattgtcgactccaacaagttgcgtaagcataatctgactttgcgtgagagcgcttcccttttcaatgaccgtctgaaactggacgccaatgctaacttgatggtgcagactattaaaaactctcctacttccggaggtatctacctcaatccgttggtggacgtttatggtttcccgcgcggacaggacctgagcgaatatgccactaatttcgaaaagttcgatgagaatcgtaatatgcccgtacagagctggtttaccactccgagcgaatggacacaaaacccatactgggtaaagaaccgtatcttgaacaacaataagcgctaccgtgcattggcctccctgactgccaatctgaaagcaaccgactggctcaacctgcaagctcgtgggaatgtggattacgtcagcgataagtttgaccagaaaatgtatgcgagtacttctcctgccattgtaggaaataacggccgctatgtatatgccgacacacagaacttcctgatttatggtgacgtgatggctatgttcaacaagcatttcggtgatttctctgtgaatgccgctttgggtggtagtattaatgtgcagaccgagaattcattgacattggattccaagacagcttctttgtacaaacccaacttattcactgttcccaatattgtaatgaacaccagtgcttctgccgagcaggtgattgaccgcagacgtacaattcaatccgtattcgcaacagcacaggtaggatggaaagacgcattgttcctcgacttgacagcacgtaatgactggtcgtccacgttgtcacataccaatagtgtggataaaggattcttctatccttctgtaggactctcctgggtgatcaacgaaagctttaaattaccgcaatggatttctttcggaaagattcgcggatcatgggcgcaggtaggtaacgacttaccgattggtattaccgatttgtccgatatcatcggggccggaggaaagttgcaggcagtagacgtatataacagaggtgacctgaaaccggaaatcagtaactctattgaatttggtctggaatggagactgttcaacagccgtgttgattttgattttacttactataagacagatactaagaatcagttgctgaaagttccgaccagtgcgggtgaagattatgcataccgttatatcaatgcaggtaagattcgcaacaaaggatttgaaatcacattgggagctactccggtgctgaccgaagatttccgttggaaaacgactttcaattattcacaaaaccgtaataaggtagtcgaactggctccgaattatacttccttcgtatatggtgacccgggtttctctatggcatatatgatgcagattaaagaaggcggctctttgggagacatctatggaaatacgttcgcacgtgacgaacaaggtaagattaaggtatccgatgaaggcaaacctatttcagagtcaggtaataaaacatatctgggaaattgtaatccggactttctgttgagttgggctaataccttcacttataagggtttctctctgtatttcctgatcgatatgcgcaaaggcggtgatgtcatgtctctgacacaagctacattggacggcagaggggtaacgaaggctacagctgaagcacgtggcagaggttatgtggaagttgacggaacaagatttgagaatgtagaaggtttctattcagtagtaggtgaccgtaacggtatctccgagcgttatatgtacagtgcgaccaatattcgtttacgcgaattatctctgagctattcgttcccgtctactttgctggccaagactaaggtattcaccggtatcgatgtatcattggtgggacgtaacctgttcttcttctacaaagatgctcctttcgatccggatgctatcttgtctgtaggtaacactaatcagggagttgatgtattcggtatgccgacaacccgtaacattggtttcaacgttaaatttacattctaactttaaagcaagcgaattatgaaaaaaaatctatatatagcgaatctgttagtagccggactgatgacatttaccggatgtacggatggttttgaatcagataatgccaataaagccggatatacgcctgaacttcaggaatatgatcttcagaaatatgtgctgaacctcggagtcatgcaacagggtatttacttcaactacgattggggaaaaggtaccgactggactttccagactatacagaatctgggtcatgatatgtttgccggatattttcacgatatgaacaacagtttcaatgacaagaactctgtatatgctttgaatgacggctggacaggctcggcatggacatatacttatggatatataatgaccgccgctcagaaatcggagaagatcaatcaggaacagaaaggtttgctgggagtgaccaaaatcctgaaagtcgagttgatgcaccgtatagctgatacttatggccctattgtctacactaaattcggacaggaagagggtgataatgtcgatagtcaggaagccgcttaccgtcagttcttcaaagatttggacgaaggagtcaaactgatcaacgaatataagaaagccaatgccgctctcgaaccttttgctgctgccgatattctgatgcccgcaggcaaacgtacactgtcacagtgggtgaagtttgcaaactctctccgcttgcggcttgcaatccgtgtatcgatgagtgctcctgatctggcgagagcagaagttgccaaagcgatggatgcaactgccggtggcgtgttggagagtgcggatgaaacagttgccgtttctaccgaaagcggttataagaatccgctgggaacagtcaatgaaggctggggagaagtattcatgggtgctacgatggagtctgttttggtaggatataatgatccgcgactgattaagtattactcgaaagcggaaggtggtgatataaaagacgaaaagggtaatttgattattgccgaaagaaataagattgccggtacttataaaggtgttccccaaggaacaggagttactgtaaaagacgagaaccgttaccgtctgcattccaagagtacgattaccaaacagaccgatgctatcttgatgactgctgccgaagtatggttccttcgtgctgaggctgccttgcgtggatttacttccgaaaacgtgaaagactgctacgagaaaggtattacggtttcctgtcagcaatggggagtgaatgtaggcgattatctcacaagtgatgctactccttccgattatgtcgatgccttcgaagcaaaatatgatgtgaaagcgctgattaaagtgactccgaagtgggatggaggtgcttctccggaagaacaactggaaagaatcctcacacagaagtggatcgcttgttatcctgaaggctatgaggcttggacagaacaacgccgtacaggttatccgcagttgttcaaagtcttcgtgaacaatagtggtggagctatcgatactgacatacgtattcgtcgcttgccatatccgtcagacattcaaaaaaacaatcctactcaatattctgctttgaagaaagctttgggaggtgaagataacggtggaactcgcctttggtgggatactggtagaaatttctagaggtttataaatattagatgtaactttttttaattcaaacttgttttctccgtgtattaggcaaaaagtagaggagaaagattgtgggggagtgaagtcaagggggcttcgctccccttgacttaaataaagttttatatgagcttacgtccttaactttgtttccctttcctttgttcttttagccggaatatacttttgttttatgcgtgcttgcacgaactgaacgtgttattctgagtattttgaaggcgaacgtaatattcagggcttttttaccgcttacctgagtgtgaatgcttattatctgacagctccgaaagttgaattgaatcatggttactgcgatttatttctgatgccggacttacttcgttatgaggtgaagcatagctatatccttgaactgaaatatctgtctttaaaagatacggcagagaaagcagaagcacaatggcaagaggctgtggagcagataaagggatatgcagttgccccaagagtacgccaattgatacaagataccgagttacattgtattgtaacgcagtttcgtggctaggaattagaacggatggaaggggggctgtcaataatgtgacttagaaaaagtatttcctattcgtccgtcatttgtgtgagttaaaaacagctagtcccttcactgttaacaggtacttttgtcgaggatgtttaggattattgggataaagaagagttacaaaaccactttgaatagccggtgtcagataattcgttataaaagtggggcgatgctttaatcctattttctccattaatgcttttaatgaatactgttctgtaccgataacttttatgattgctgtaagtggtgcactgagttgttcggttagcatgttcggtacttgttcggtacttgttcggtcaacttgttcggtcaacttttgtggggcgttgataatcattgttctatttttcagctcattattttctcctatcatcagattcctgaaaaacaaaatcaaaaaactcatatcagattcaacgcctttccgtacatttctataattggcacgaactaatgcattgcgaaaataccaagagttgtcggcaaacaagtcattgttcacgtcaaagccgatgctgcgtaaatactttatagtaaatactgccgtagtacgagtgttaccctcgccaaatggatgaatctgccagatgcctgatacgaacttagctatatgtaccactacatcgtccatagataagccttggtatgagaaggtcttttcttgctccaagtcatattctaatgccctgcgtaaatcctcagagttgacgtaaagtaccgtatcaccacgaagtacccattcttttttcgttatatcatagtcgcgaatttttccggcaaacttaaatatctcttcaaataatctgcggtgaatggaagtgaatcctgccacggaaaaagcaaacgattgttcgtttaagattcgggcaatattggcagataccttatccgcttcctcagtctcttcatcttgtaaagtacgcgcagtctttgattgatagtatccattgatgagtttcttcacctcatcaatgcttatatcaccttcgatatgctttacagctgtatctttaagataatcagatgtctgtaatccatctacagcttgtaagccgatagctgttttccaagctgaagccttttcttttttgtcaggctcgctgccacggatgtatgattcaaaatctatgtccatttgtatccaatcttaaataaccgtgagcttactataaaccaacggttaattctttgaaaataagtaatagcagtagtagacttatggtcttcagttataatatttactggattttaccgctaaattcattgaaagcaaaattactgaaatttattgtttagcaggcgatttctgccaagaaatcaccaaataacaagagaaattctgaaacggtggatgatgagctcaaaaatattgttcggataggacatctcagacatagatctttctcacaccattcagccttttcagtctcgttcgcaaacgccctgatagaaggggatagaggctgaagtcgctattttgtaccccgtctttggaagcatctgagcgagagttattgatttcagctctttcagtcggaaaaaataagagcttcgaacactgttagtcttaggctcaacagagcctgtgtttatctcaatttgaggctccattcggtataaacagagggtctgtccagagtaaacagaccctctgtttgtttctgaactattggtttgtctttactcttttgaaataagccggcatcccacttacttttatctcggtggtgagtaacctttacctcggtggcgaatgaaactcatctccgagcttacagaatttaccccacgtgttgagggactataacttgtatgcagagtcgctatagtaaacaaactatggtttttatgtattatcaacgctgaaaggactgaaatcagttactcccgttcagaggttcctaaatgcggggtacaaaatagcgcattcagcctctatccccttctatcaggacgtttgcgaacgagactgaaaaggctgaatgcgaagagtgactcaataagagggtggagtggaggtagtacatctttgctccaaatcttgtaccggaatcagacaacttaagtacttatcacaatccagtcttgtacttattcggaagtactcttatagaagtttgattccctcttgtataagggatttgctcattattatttcgaaatgaagctttccgtagtttggagttgatgtctttattttaaaagggacgaccccttccttataaaaagaaagaggccgtggggataaaaaaagactggtggggtatttatatatagattaggatttattgtttttgcttagatgttgggtgaatatctcttctgactgatattcttctgctatctgttttattctttcatcagtttgatctaatatgtaatttagttctgtttcgtcgaaacaatctcctaagtgtatgggagtatgtagtaaatctgaattctgatttgtttctgttgctaattgttgtctatgaactgtgacttcaatttctcccttttcatctgtagtgaaaagtaagttgtatttttctatcagggcaatgaattcttttaagaacttgtattctgtttcggtcaatacttttatcatatttgttcgtttggtgtttattttatacttggcaaagttctaatttctttttgaactttagaatgaaagtaatatgatttttattccatttgctaagttggaatattccttttattcatattaccacatctattcgtttttttcgtatatttgcttcgaacgaaacttttcatttgtatatttgttggattttaaaaagaaaaaagaatcatggaagcagaagaattaactgttgggagagttcatcatggacataacatacgtcgttttcgtatagaaaagaatatgaatcaggaggttttaagccaattagtacatttatcacaatcagcagtatctaaatatgagcagatgagagtgattgatgatgaaatgttacaccgcttttcacgggcattgggagtccctttcgagtatctgaagagtttggaagaggatgcgcagacggtggtgtttgaaaataatacggtgaatgattcggaacaatatacaggtggagcaaagattagtttgggtacagttaagtcttatacagaagatagtgacaatagtgttgataatagagtcaacaacttcaatcctatcgaaaaaatcactgaactctacgaacgtctgctgaaagagaaggatgaaaagtacgcagcactggaacgtcgtttgcaaaatatagagcagagcttgcagaaataaagaacaaatataatgaaaggaatcgtgatatgatgaaacaaataccctatggattgacggactttgcccgaattcaaaaggacaattattactatgtagataagaccatgttcatcgagagaatcgagatgcaaccggcttatctttttctgattcgtcctcgtcggtttggaaagagcttgactttggctatgttggaggcttattacgatgtagtatatgctaatgactttgatgagctattcgggcatctttatataggtcaacatccaaccccgaagcataattgttatctcattatgcggttcaacttttcggaagtaagttctaatgtcaatgaagtagagcgatcatttaaattgcattgctgtagtaagcttagggattttgtgttcaaatatgaagatcttttgggaaaagaaatttgggatgttctcgatgaagagatacagcaagatccgggtgcttttttatcagctgtcaattcttatgcttcccgtaaaggaaatctccctatttatctccttattgatgaatatgataattttacgaatacgattctttcgacctatggtacagagtattatcaaaaggcgactcatggtgaaggctttgttcgtggattctttaatgtgataaaggctgctaccaccggtacggggtccgctcttcagcgtatgtttatcacaggagtgagtcctgtcacgatggatgacgtcaccagtggttttaatatcggaaccaatattacgactgatccttggtttaatgatttagtaggtttcagtgaagcggaactgcgtgaaatgcttacttattataaagaacagggagtgctcatgcaaacggtagatgagacaattgtcatgatgaaacccaactatgacaattactgctttagtagaagtagattagcagattgtatgtttaactccgatatggtgctttactttatgaaatcttttgtattgcatggagaaaagcctgatgaaattgtagaccccaacattcgtactgactttaataaattagcttacttgattcgacttgaccacggattgggagagaacttctctgttattaaagaaatagccgagcagggagaaataactacggatattgctacacacttttccgcattggaaatgacggatgtacgcaatttcaagtctttgttattctatttcggacttctttctattaaaggagtcgatatggtgggaagacccattctgcatgttccgaatctggtggtcagagaacagctttttagctttttgatccaaggatatatcaaacatgatattttcaagattgatatgaaccggatgacgatgttatttgagaacatggctttcagaggagactggaaaccgttgtttaattttatagcagaggctatccgtgagcaaagccgtattcgcgaatatatagagggcgaagcacatattaagggctttttgttggcttatttaggtatgtaccgttattatcaactgtatccggaatacgaactgaataaaggttttgccgacttccttttcaaacctagtccgtcggttcctgtaatgccgccattaacttatctgctcgaagtgaagtatgcaaaggctggcgcttcggagaaagaaataagggcacttgccgatgaggcgcgggagcagttacttcgttacagccaggatgaattggtagcggaggctaaagcgaaaggcggactaaaactaattacgatagtatggtgtagttgggaacttgtgctactggaagaagtactttagattcctactgcctttatccccttcaagtagttccagcattagtttcaagcgaatgaaactttcagtgagagcaaacgtttgctctcactctgctaccacagttgctcccattgctgtaaccctcatgaataaagggatatagataaactgttagagcatgagagcaaaactgctatcaaatcactgtggaggctatataatgtatctgcccgaatcatttatactgtacacgaaaaaacagtaacaattgaggtgattgccgtgcggagctaagagccttacaagtaaaaataggaatggctacgtttgttatttatagatttgtacaggaagttcccctcttaatgcccctaaagcattaaatgctaatgactccatttccccttcaccgggatagacatgtataggggctaagaaagagattcttttcttcagtcttgaaatgatatagtctgaataagcaatacctcctgtcagcagaatggcatctactttcccgtagagtacggtggcggctccgccaatggctttcgcaacattatatatcatggcatccagtatcagttcagcttttttgtcaccttcttctatggctttgataatggcgggaacatcggtagtgcctagatgggctgtcagtccggcacgtccggagatacgcttctttaattcatctttcgtgaactgtccgctataacaaatatcgatcaactgaccggcaggaagggtgccagccctttccggcgagaaaggcccttcgccgtctaaagcattattggcgtcaatggctttgccatgctgatgaacggctatagagataccgccacctaagtgacagattatcaagtccagttcttcatatttcgttccctgctcttttgcgaagcggcgggcgattgctttctgattcaaggcgtgccagatggtgatcttaggcatcagcggagaacccgaaatacgcgctacatcttccagttcatccaccactcccgggtctgcgatgaaagccgggcaatcaggaagggaagcggccagttcggctgcaatcagtccacctaagttgcaggcatgggtacgcatggcgtgcaaagtatcttgcttcatggcttcgttgactgcgtagactcctcccggaatgggtttgacgaggccgccgcgtccgatgacagcatcgaatgcaaagggtattccatttgcctctaattcctgaagaaccagattcttacgaaattcaaactggtctatcacctgcggataaacggataattcttcgaccgtatgcttgatgttacggacgagcaacggagtttcgttctcgtagactgctatcttcgtagaagtggagccggggttgatgaccagaatcttcatatctttggagttataaggtttgaattatgattaacggttcaggttgagcttctctctgcattcgcagccggccacttgcaggcaggccattgcgatgctgtaatatttcgataagccggaatcactgcgggaagggagtactaccggacagataggtccttgcaacaatcctgccatatccgcattggcaaacagggagacggacttgtagaacgcatttcccgattctatattggggaaaatcagcacatccgcctgtccgttgataggcgaaacaattcctttgatgtccccgctcgcctgctcacaggcagtgcgtacatccagcggaccgtcgatgattacatttccgaattctcccgcttcggcaagctccacgatgtttacataatccagcgaatgcgggaatttggcgctcactttctcggtacagtgtatcagtgcaacgcgaggctgctcgataccgaaatggcggcaagtgcagatggcataccagatcatttcaatccgttgttgcagcgtggggcgtggaatcactgcggcatcggagaagaacagcagtttatggtaagtcggaatctccatcaccgccaagtgcgtgaggattttccctttgggtagcagtcctttctctttgtcaaggatggcgtgcagcagattgtccgtgttgatgatacctttcattaaaatatccgctcccccttcacgcacgatgcggacagcttcacgtgccgcttcgtccgaatcttcgatgtgaatggtcttcacgtagtcgggatattgcttcaaggcaggatatttttccagaatagccgaatccccgatcatgagaaactctgcaattccttcttccaaagcacgggtaatggcatattccgtattagggtcgttggcgcagactacggcaattcgtttcctacgattctgttgtttaagatgggctgttagctgggcaaagttctgaataggttccataacgttagatttttagcaaatatcagaaaaatcattgagaaaataatactcataacccgaaaacttacgcctgttatgtaacattttgttatattttagttgttttagtgtgtagatatacaccgaaccgttttttcctgtatttttgcaaatgaatcccccttaaactttaaaacaaaatgaaacagttcagaaatctattatttattagcacattactcctttgttgggtactcgtttcctgcaaaacgacaagagtttcttcctccggctggtcgttggtatgggaagagaattttaatcagaaaaaaggctttgacccgcaggtctggagcaagattccgcgagggaaggccgactggaataattatatgacggactttgattcctgctttgccatgcgcaagggcaagttggtgttaagaggcattgccaatcagacactgcccaatgatacggcaccttatctgacaggaggcgtttataccaaaggcaaaaaggcattccttgacggacgcatcgagatatgcgccaagctgaatgccgcaaaaggagcatggccggctatctggctgttgcccgaaaatgccaaatggccgtcgggaggcgaaatagatgtgatggagcgtctgaatgacgactctatcgcttatcagacagttcattctcattatacgtacactttgggcatcaaggatcatcccaagtcacactccacaggagtcatccatcccgatcgctataacgttttcgctgtagaaatgtatccggacagtctttcgttctatgtcaacgacatacatacgtttacttatccccgcatacagacgcagaaggagggacaattcccgttcgaccagccgttttatctgctgatcgatatgcagttgggcggttcgtgggtcggagcagtcgatcccaaagaccttccggtagaaatggaagtggactgggtgcgtttttatcagcgaaagtcactcaaataaaacattaaatatgaatattcaacttccttcttttttacagaaaggtgacaaagtagtgattgtgtcaccttccagcaagatagacaaagagtttctgaaacgtgcgaagaaacggcttgaatcatggggattgaaagtctctatggggaaatatgccggaggttcttccggacgttatgccggaacgatccggcagcgtctgcaagacttgcagggtgcgatggatgatccgaaagtgaaagctattctttgcagcagaggaggatacggggccgtgcatctggtggacaagattgacttcaccgcctttcgtgaacatccgaagtggttgctgggattcagcgacatcactgccttgcataatttatttcagaagaatggatatgcctccctgcattcgctgatggcgcgtcatctgaccgtggaaccggaggaagacccttgcgtggcctatctgaaagatattctcttcggcaatctgcccgtttatacttgcgaaaagcataagttgaacaggcaaggtacggccgaaggtatcctgcgtggcggaaatatggcggtagcttacgggctgcgcggcactccttatgatattcctgccgaaggaactatcctgtttctcgaagatgtcagtgaacgtcctcatgcgattgagcgcatgatgtacaatctgaaactgggcggtgtgcttgaaaaactgtccggactcattatcggtcaatttaccgaatacgaagaagactgttcgttgggtaaggagctgtatcccgctctggccgatttggtgaaagaatatgactatccggtttgttttaattttccggtaggtcatgtgacgcataatttgccgcttatcaatggcgcgaaagtggaattgaccgttggaaagaaaaatgtggagttaaagtttatttgttaataatccattctatctgaacgatactgtggtgaaaatgactaattttgaggcttcatatagataaaaggacgatgaaaaagaaatctatgatagtattgacgagtgcctttgtattattatctgctttttcttgtggaggaggcggcaaggcaactggtacgaatgaacaaagtgaaaaagtggtggtaaatgtacctcagtttgatgcggacagtgcctatttgtatgtaaagaatcaggtagattttggtccccgtgtccccaatacgaaggagcacgtagcttgtggcaattatctggccggaaagctggaggctttcggtgcgaaggtaacgaatcagtatgccgatctgattgcctatgacggcacactgttgaaggcgcggaatatcatcggctcttacaaaccggaaagtaagaagagaatagcgttgtttgcacattgggatacccgtccgtgggcggataatgatgctgacgaaaagaatcaccatacccctattctgggagccaatgacggagcaagcggagtgggagccttgttggaaatcgcccggttggtcaaccagcaacagccggaactgggcattgatatcatctttctggatgcggaagactacggaactcctcaattctacgagggaaagcacaaggaagaggcttggtgtctcggctcgcagtattggtcgcgcaatcctcacgtgcaagggtataatgcccgttttggtatcttgctcgatatggtgggtggtgagaacagcgtatttctgaaagaaggatattccgaagagtttgctccggatatcaacaagaaagtatggaaagcggctaaaaaagcaggttatgggaaaaccttcatcgatgagagaggcgataccatcaccgacgaccatctgtttattaaccgtctggctcgtatcaagacaatcgatattattcccaatgatccggaaacaggcttccctccgacttggcataccattcatgataatatggaccatatcgacaagaatacgctgaaagccgtcggacagacagtgctggaagtgatttataatgaaaagtaaatagttaactagtaaaccgtaaataacttcatgtcaattaatgaattacaagacgaagtgattgctgaattcagcgacttcgatgactggatggaccgctaccagctgctcattgacttaggtaatgaacaggaaccgctcgatgaaaagtataagaccgaacagaatctgatcgaaggctgtcagagccgtgtatggcttcaggcggacgatgtggatggaaaaatcgtgtttaatgcggaaagtgacgctttgattgtgaaaggaatcattgctttattgatcaaagtcctttcggggcatacgcccgatgaaatactgaatgctgatctttattttatcgataagataggtttgagagatcatttgtctcctacccgtagcaatgggttgctgtcgatggtaaagcagatacgtatgtatgcgctggcatttaaggcaaaagaagggaaatgaagataaaaaggtaatatagaatgaacggtggatatcctgcggaccaggtatctaccgttcattttctttttcctcctcctgatattccagtatatctgccggctggcagtccagtactttgcagatagcctccagcgtagagaaacggattgccttagcttttccggtttttaatatagaaaggttggcgggggtgatatctatcttctccgccagttcgcccagagatatttttctgcgcgccatcatgatgtcaaggtttactataattgccataattttattttctcggtttgagttaaatggtgagctcctgttcttctttcattttcagcccgatagcgaatgtttcggctacaatcaggcagccgagtcccaataataaatcagtcgtctgtagcgccaggggagcgatgatataatgttcaagcgcgaatacttctttcagtccccagtagttgacgacctgcggaatcaggtaaaacacgaaggacataatcagcagactacccagccagcgcaggcggcggacattcttccattcgaatatctgcgatttgttgatgctcaaaatcagcatgacaaagataataagtgcggagatggtgagcagtgcattcatgagcgaacaggaactgctgataatcagataactgtagttcacctcttttccggtgcgtaccgccatttgcgtatacatgacgggcactttctcattgttacgggcattgatgatcgtatccggttggatcatggcgatcgtaggtacgacatccacaaaacggaaatcgcctgcaagcataggtctgtcacatgctttcgattccttgtgctgttctttggccagactcattccggctttcatgcctgttccgaactggtatcctgtggtatacagagaaagtcccagaactatgaataccaatatgctgagaatattcaaacgttttttcatcgctgttatttttttagtccgtgatatttgtttcttctttccagggatagcggacggtcgtacgacgcatcgcccagataactcctgccagtatcaaaactgctacaaaaatagtaattagataggagctagtgttcatcagatcgctcatattttctgcttccggatattttgtactgagaaatacggataacgaattattcagtatatgcatcagtatgcaggggatgaggctggcagtcttgtaatacgtccatgcaaacaggataccgatcaggaatgctggaagtatctgggcaggattgatatggaaaacaccgaataaaagggctgaaagcagaattgcctttgtcgggctgtactgctgtagcaatgctttggtgatggctccacgaaatagcagttcttcgagtacgggacctatgacggctatggcgagaatgcctccccagccggactggaggatatcgaaggattgttccatgatgttgggaatccatttcattagttccgccaatgcggatacgacgaagccacaggtgaggacagccaatgcgctgaagaacagatacggggatgaaacgggcgaccaggttattttctttgtgctgatgtatccggctttccataaatagatacccatcatcagctgaccggccagttgcgccggaatcataagcatggtgataagtgcgtctttgtctaagtttccggtagtggctaccagataaatcacacagggaatcatgactaaaatgggagcaatgatctgtgcgatgagcagattcagtaatatcagtttaatagcagttctcatattcgttttattcttagtattcttggataggatacaaagataatcgtttgttatttactggcaatgaagctgcacagaaacatggctatcattgagatggatactaccagcatcgatatactcattaatgactttttcataaagtgttattttttaatagatgattaaataggaaatgtttgtttatcgatgattatttatcgtttatcgatatgcaaatgtagaggtaagttttgagttggcaaaggaaaaagagattttatttatcgaaaaacaataaaaaagatatgtttttcgatattatcggactcgtttcagccgaaaagaggcttattaatgtggtcaatttagagaaaaagggggatcatttctcctgtttggcggcgaggagaatggcttcagtttcttccgcatccttgtgaagctgtgcgattagttcgtcgatactatcgtattttagttcggggcgtgtccgcttcacgaaagtaagccggataaatttgtcgtaaatgtcggagtggaagtgaaggatattcacttcgattgtgcggttgggaccatttccgatggtagggcggacgcctatattcagcattcccatataggtctttccgtcgaatgtgacccatacggcatagactccgtctgcgggaatcagtttgtcgggatcatccacgcttaaattggcagtcggaaaaccgatcttccggcctacctgatagccgcctactaccgttccgtccagaaagtattcatagcccagacagcgggcagctacgtctacatctccctgatgcagcaacttgcggattaaagaagaactgaccggagcactttggatggtatctatctgtatatcatctgtgtaagcctgtgcacggatgacctcaatgccgattgcctgcccgtagcgtacataatcgtcaaacccttcgctgcggttgtgaccgaaacggtgatcgtatcctatcaccagatactttacctgaaaacgttctttcagtatttgagtcatgaattctttggcggtcagacgggagatgtcgggcgtaaaatcaagcatcaggcaataatctactcccgtgcctgcgagcaggtttgttttttcttcgggagtagttaaaagttccggatggtaagcggcgttcatcactttgcgcggatgaacggggaatgtgaccaatgcagaacgcagacctttggctgccgctatctccttcacctgttgaatcagatagcgatgtcccatgtgtactccgtcaaagaaaccgatggtagctacgcatggttcgggaatcatagccgatgtgtcatttataatctgcatacttacattctcatttttttctgaaaagatggctccagtcttcaccggctttcggtgtgtaggtcgagatacccagttcctgagctactttacagttaatttcggaatcgtcaataaaaaaagtctctttcgggtcaatacccgcatcttcggtcaccgccttgaatatttccggttcgggcttggccattttcatttcataagagagatacgtcttctcaaaatagtcctctactttgaacgtacggtaggggaaggcattcttgcatacccatttccagtggatgtcattggtgttgctgagcagatagactacgtatttctcgcgtagtttgagcagcaagtcgagcttgtaggtcgggatgtctaccagaaagctgttccaggctgcgtcgatctgcttgtcgcttaccatctttcccatcatctcccgaatgccgtcacggaattcggcaggagtgatcagtcctttctcctgctgcaagaagattccgtccagctggtgggtgcagaacttttcttctatgttctggaacccgatctttttaaagttctcaatacaacgttcgcggtcgagatttatcagtacaccgcctaaatcaataagtaagtttttaattcctttacttttcattattttctcatttgtgaatactacgttgaacaaggcgaataagttctccaacccataacaccgtggacgaaacgcctataatcagaagccacgtctgccagtcgagcggctctgtgcggaatacagctccaccgaactgtacgatcagaaattgtccgaccagaatggccagaacaatcaactccatgccatacgatttggaaagtcccttgaatgccgagtcggtagtgccgaatacgcgggcattgaacaggttccagaattgcagcatgacaaagaaagtgaagaaaatggtgaggttatgtacatccataccttgcgcactgtggtcgaaataataaatcattccgagcaatacggcgaggaagatcgtacctacacctaatatattgttacgcatcgctttgctgatgataaagtcagtgctgcggcgcggtttttcctgcatgacggtttcgctgggagggatggaagcgagggccagagcggcaaaagtatccataatcaggttcacccacagcatttgtgtcactgtcagcggaagttctgttccgatcatcgatcccaataacacgatcagcaaggctacaaagttgatcgtcagctggaatacgatgaaacgctgaatattcttataaagagaacgtccccacatgacagcggtaccgatgctgttgaacgagtcgtcgagcagtgtgatgtcactggcttctttggctacggacgtacctgtacccattgacagaccgacttgggcatgattcagggcaggcgcatcgttcgtaccgtctccggttacggcgactacggctcctttttgttgaagcaactgcacaagacgttgtttgtccgtcgggcgggcgcgggacatgattttgaggtccatcacacggtccagcgcttcttcgtcactcagttcggcaaaggcaacaccggtgatacgattccggtcggtatctgtttccggttgccacagtccgatctgacgggcaatttctgtggcagttcccggtgtgtcaccggtaacgatcttgataccgataccagccgactggcatttggccacagcggcgggtacatccggacgaatcgggtctgagatggctacgactcctaagaaattaaggtcgttggcagataccagttccgtgcagtcattcggttcgttttctcctactattttgaaggcaaagccgagtgtgcgcattgccatattctgataattcagcaactgggcttctactgtcgaacgatattcgacggcatctacccgtcggccgtccagcacgacttccttacatttgccgagcacgatttcgggtgctccttttatataaagtactttctttccgatgatcggagactcgacgagagtcgccataaatttacgttcggtcgagaaggtgagctggtcgaggatgcgggcgtgttcacggagttcgagataatttcttccctgactgttgagccataataacagggcgacttcagtagggttaccgacacctttcggcttttcgcccgttgccgcttcttcgaggaaagcggttgagttggcgctgattccttctgcgacgagagcgctgatgtcatcatcgcccaggttgccgccattcttgattccgtagaaattgggttcgtgtacctgcatcaggttttgagtcagtgtacccgttttgtccgtacagatcacggtgatagctcccatcgtctcgcaggcgtgcattttccgtaccagattgttggtcgagagcatacggcgcatattcagggccaggctgagcgttacgctcatgggcaatccttcggggacggctactacaatcaaagtaacggccatcatgaaatatttgagggtccgttcgaaaaccggaagccactcgtgccagccgttcagcgaaccgaaatcaaagaacaacagtacatcttttacaaagaagataaggaaggcaagtccggcaacggtaaaaccgattttaccgatcaggttcgcgagcttggtcaactgtatattcagaggggtcggttccagattttcttcggtgctctggcgtgctaccttgccgatttctgtggcatctcccacgtgcagtacgcgcatggtaccgtgtccgtccaccactgtcgttccgcgcatcactaggttggaggcataggttgcttcttcgtcaaagtccgcttcgatcacagtcttgttgattaccggttctccggtcaggttggattcgttcacttgcagggagatcgcttccagcagctggccgtcggcaggaatctcttcgcctgtttccagtatgataatatcgtctacaacgacgtctttacgtgggatttcctgtacgtgtccgttgcgaatcacttttacgagtgtttcttcattgacggcgttcagtaagtcgaattttttattggcatcatattcgaaaaagaagccgatgcctgtggccaataagatggccgctatgattccgatagtttcggcatattcattttcgatgatggaaatgatcagtgaaaatacggcggctaccaacaatacccgcacaaccggatcttcaaacttttcgagatagagcttccataaggaaggacgcttggggggtgttaacagattgacaccgttcttttctctgctttgtaggacttcgtcatccgtaaggcctacatgataataatcgtctttttttgtagtactcatgcaaatacatgcgtttgattaggaccgcaaaaatacaacataaaattgtgataaaatgtttaattaaaactttttatgaagttactttattcgggacgtccgcaagtacgatagggaatagtaaaccagaacgttgatcccttgccttctacggagtctgcgccgatttgcccctccaatttgtttacgatggttttagagatggaaagtcccagccccgttcctttcttgtctttgttcagctttacgaagcggccgaaaacttccggtagtttgtcggcagggattccggctccggtgtcggtgacataaaaataaagttcggtatctcttgcctcataaccgatgctgatcgttccctcctgcgtgaatttaatggcgttggtggtaaaattggagagcacctgcgcgacacggttccggtcggtctctatgctacaggagggaaggcttggttctgcaattatccggatgttttttcctgcgtcgttgactctcatttggaaaagctgccgcaagtcggatagtaacagattgatatctacctttgtatatacaaattccagtgtaccggcttctattttcgacatatccaggatatcgttcactagttgcagcagcagatcggcattcatctttatgatctcctgatattgtgccttttcttcttctgtattggcgctggcgagtacttctgcaaatcctgtgatggcgttgagaggcgtgcggatttcgtgactcatattggcaaggaaggcagacttcgaaaggtcggcattttctgctttctctttggcaagtgtcagttgcttttctgtttctttaagttgggtgatatcgtgcacggtaagtaccatattctcttcttcgttaaggagaaaataggaaccggatatcacggcgtcacattctacggatttcttttcggaagtaagcacgctcagagtagcttccagatcagtgaagcctcttctttgttcgaaagcctggcggatggcacaacgtatggggcaggagccacagtaagcatgagtaccgcagcctccttccgccgataatgcgttgcggcattgcaataagtcgcccactctcttttcttccagacctttctgagttccggtgagttgatagtagtttgtttttaatactttgaagtcgttatctattaataagatataggcatggacatttttcagaatggcgctggcgatgtggttggtatgttccagctttctggattcccggaatagtcgtttttgcatccgaagacattttctccgttcccatagatagctgagcaggaggattgcacatataattagcaggataggtagcaatgctattagcatgatgtaacttgttggttttgttctacaaatatgttgcaaagataacttttttactcgggataagaaataagttcgaacaatttgcattttatttgcgttatattatttagtaaaccaataaaaaaacgaacgttatgaaaaagtacatttgcacagtctgtgaatacatttacgaccccgcacaaggagatcccgagagcggaattgaaccgggaacagcatttgaagacattccggatgattggacttgtccactttgcggagtcggaaaagaggactttgaaccgtacgaaggataaaaaaattaagagagagaagagattattaaaaaaatgaccggaaagcagtgcttccggtcatttttacgtttcagctcatgcagagctttttttgttcctgtttttatactgtcgggtcaggtgcttcctcatcgccgccgtcatcgccgccgtcggggttgggaggagtaggagtgtttccgttgtcaacgatctcgctgccggttaccagtttttgaatacttgcctttttcagcatatccttaaacttgtatcccggagtaaatacaatcttcacccgacgaatcgtgtcggaatccactgccgcttctgtctcctggctttcgctgctgatgccgggacggaattgaccgaaatcacccagttgtacggaaatacctttgtttaagtttatattcagcgtatcgatcagtgcatcgagtacaaacttgaccgctccgctgggaaccattcccactttagaaatctcatcacacaaatccttgaaattaaccgtattggtaataaaattctgtgctacatacttttcggttttctctttaccgaaaccaatcattctttttttaacgacatacctaagtgccataatcttttttgttttttaatagttagtaaatttgtttcttttgttttgtgatcacgatgcaaatgtatgtgtttccaaatgaactgccaagaaaaaaactcaaagtgcgttaataagtttcttcaactaaagaaatggtcagatgttttttttgttgttctcctttcatctttttccgattgaagattgtccttttcatatcatatccatacctttgtagattcaagaacccaacgtggctccggtggctcaggagccgggatgtccggagaacgaccggctaggcgatggaaagggaatgaagaatatgaataaagaattaacggatgtagtataaatgatgacttcctgtttattaagaatacacagtttacgctttttcgacggaggcttgcatgaggttcctgtggaagaagtgatgacggttgcgcttattgcgatattcatctttgttccgtgcctgtggcttgtccggtatttaaaagataagaggctggactcggacgagaaagacaagtttatacaaatacatattatctcgaccattgtcctgactattgcgggcggtgtttttgcacggatgtccggacttgtcaataaatggatagacgaacagccgttgattatcgctgtttacatcgctttggcgcttagttccttcggcatcattgtcggaaaaatgatcgacttttgggtgtattgtctccgaaagaagatgttttaagtatctgtatatagatgcctgttgcctctgcccgaagaaggttggaaacaggctttgtccggtatttattgctaaagtatggttttgagggtcgtttcgataccatcacagggcgacaattgtccctatgatggtaagtgccaagtatgtacagttaatatagaatgttgccatcaatattcggggaatatattctgactttctgaacagggatgaaggttcgttgattaataaggagagaaggaggagtatgctaaaaatgacctgacacatcagtagccatacgggatattccgtaatggaaggtacagcccatgtttggagcagaggagtcatgttttgcagaaggagatgggctgcaaaatagctcaaaaaggaaacagcttcttttttctgccgtaagagtgcatttatggtgtaaatccccattcctgcttgccccagcaatatagaaatctggaaaaaatagaatatccaatatattgcattgggggtaataccgtcggtggaaaagtaatcatagaaacagagtgaggacacgcagcttatagcaatcagtcctgcgcagataaatgaaatgattcttttattcattgtttttattttaaagctaatgggttgtagatagctgaccgttagggctgcttatctacttgttagtaactttgttttgttgtgagttattgagacgttgaactaacatttctctgaactcaacactattacattcatttataagttctttgtatttaataaattctgtttccggatacacagactctatcaaatgtaacaatgtccattctatcccatataaagcagtaggtggaaagagcttgattaaaatatgcgcttcatccaaagtgataggcttagttatcttacctaataagtctgcatatttatcaatcaatacatctgttggttcgtctgtttcatcgggcattgcacccattaaagctaattgttcaacttcttttctcataattctattgttactaacattatactaacagcggtcatttaatattccgctgttattttctctaagtgtactgtttaaaagccttcctatccaatatacttttataaatattggctatctataaaacatattctccttattcatctaatgagttcaattagggacataagctatatgcatcaaatcattttcttcgcataaaccacctgttttcctgctccatagcgcatcagtatctctttttcgataaaagtgttcagctcttttagtgcacgctttttgtcgtgaccggtcatatggcaataatcagtgcgagtcatgcaaggatatttttcaaggtgggcggttattagtgccagacattccgcttcgctacgtccgttacctttggggcgggtgagggattcggtacgttccaatctcatgtcataccctacttcccgcttaaattgtttggtcggtagatagttgatgttttttagtttgattgattgtgcacgcacatctttcttgtgcattacgggtggtccttgcagcgatacggagaaatagccgatctcgcctaattctacaatccagccgttagccagtaaatcttttaactcattttgaaaagactgcattgctcctgccagtaaactacggctgattcccgtaaatttgtgcacgcggtccagaaattcgtcctgaccgatagtccctttgggaacaatgcggggatgaaggggttgtttttctcctgtctgcttgatatcgggagtctcgtaaaggtcatactgtgcgctcataacttaagttattttgttgtgttattaatatttccgttcctataaactaaggaatccggcttaaatattaattcgttctactacagttccccgtgcgtaccactatagtggggcacaaggggaactatagttcttctttcgtaccactatagtggcacgaaagaagatttgcatacaaagttattaatattaaagagaaaagggttaaccttacgaggtttttgcgttaattatttatttccagccgcaattcctcttgcatcaccttgcttttcccatcctttgtgtatcggtacgacagcagaaatacattataagtatgaccgaaagattcctctaccttgaatgtattggggtatttggagtcaccgtctatctgagttacctcaatatccttgtacggctttatcgtgacatgattgttttcctccacttgcagtatgatggcggttttgttgatgtgatccacattgctttcaaaagactccgttccggctatcacgcgtacgctgttgtgggtgagtggaaacatcttcttgttacctgcggttgccatcccgtctgccagaccggtcattgaatagtaaacgttttcgccctgcgttgcataatcgttcttgataagtatttgatatagaatggtgtttttgctttcattaatctcgacaccggagatatccgtagcttttaatcctacgaagtaggtagaatccggcgacagtccttcgggacgtatcttgatcatggttctgcctgtccgttcgcctgcattgatctgaatcttgtaatctacgatctcgtatttgtcactggacaggaatttggcatagcaggcttcatcgacgtcgtaaagagaccgattgtagaattccagtgaagtcaggtcttcttccagcccgatcaccatgtcttgtttcggggcatgggtacctccggtgcaggctgcgatatatcctgtcgcctcttctccggtaggggacaaggtgaccacttcttcaaacgtgttatagtagtcactgctgattagggccactacattcttgtacatttctttctcaaacagcgcatcgtcattgcatgacgaaagcgctgtcataagtgcgagtatcgttataaaatctcgtttcattttcttttttgttatttagattaataacccggattctggtcgagggaaggcagtctcctcatttcgttgcgtggtatgggcacccagacagaccttttgtcaaccaccctcgtcaggaatgaggaagaactagggatgacacgctggtagtaagtctctttggttgcgccgtcgggattcattccacggataggttcctgctctgtctcttcataaataccccagcggcggacatcatagaaacgtctgttttcccataaaaactctaccatacgttcgcgttctatctgtttctgtacttccggcgtactgttgagttgattggctgtcagccccggtagtccggctctgtagcggacttgattgaatgcttttttaatttcctctttgtccctgctcatggtataaggctgaccgtccagttctacggtgtgggggccggtcaggttgttgagtgcctccgcatacgatagcaggatttccgcgtagcggatgatgggataggctttctggatatgacgggctccggtgccggtccaggcatccatcgggttattgtactttttgattacgtatccggtgatgggatagttgggtgaggtggcggtaacaccgccacgaccgtcttcatcctgatagtagtacttggctgtgtggttgttgagagtcgaactggacaatgcctgccatactgcctcattgaatcctacagacgcgtagaaccgcatttcacgattggcgtacatcttatatacaccggcgttgaggggatagccggaaaagttgcgcggttcggaagtgaagcctgtctccgagtaatatccgtcggcggcggcttcttctttcgtacggccgtcgtccatcagataggcgtctaccactttctgagtgacgcagaaacgtccccacccacccatcgagggagggaaagaacctttgctgatggtttcgttgaggtacgtcgtgtttcttccccagatcaattccgggttgatggacgctacggcttcgccggtaaagatgtccgaataagatttgaaagggtctattccgtcggctccgttcgggtaggtgtcatagaaattggggtcggaagtgactccggcgggaagttccggtgtgttgtcgtcttttgcatacgtatagagcttgtacgctcccatatccatcacccgttttgcggcggcagcagctactgcccaccggctttcgtcatattgttgggagacataatgcacaccgtcggtcttgcgtttccagttgccgaaataggagctggcaacaggccccccgttgaatagcgggctggcatgtatcagtcgcaggcgggctaccaggccgagtgcggctcctttggtggggcgtccgaagtccagcgtagaaacatcctgaggtgagggcagcagccgtgccgctttttcgaactcctcacaagtatagttcattgtttcgtcataggtggccctggggcggtcgtagtattcgataggttcgttggtattcactacttcgtctcccagcaagattgccggaccgtaatcgaccaaaagattgtagtaggcgaaggcacggataaaacgtgtgtatccttccagtctgagccgttccgagtttgtcaggtctttcgggcggtcgaggttttgcaggatgctgttgcacttacggatgattttgtaatacttgccccattggttcaggttgggggagccgtctccgaggaaatcctgtgtgatctttccgttggcgaaatccatgccgtgatagatattggccgttccgcttccggtcagtccgttaaatccttcgtcggtcgccatcggtcccggtgtgtacccgttacggatggtctgtgcctcatccgggaacatggctgccgctccccacatatacgcttccatatatcgggcattggtgaaaaccgagtcgatgttgaattcatcatcaaagtaattgtctatgtttaagaagttgctgcaggatgtagccaacatgactgcctgaaccaagaagaacgttcttgctgttttttttattagggatgttttcattttatcgtttatcgggtgatgtatttattagagattgacatataattgcagggaataggtggaagggatgggatatacacggccgttccagcgtgcctgctccggatcgaagagtttcactttatcccatacatagaggttgttacctacgaattggatatccagtgaagaaacacctatgcgtctcagaaatgctgttgcaagatggtaattcagggtgatttcctgtaagcgtatgtagcgtgaatcgccctgccaaaaggtggacaactggctgttgttgctgttatttccatattgcaggcgcgggaaacgtgcgtccttgttttcggcaagggatgggtcgatcccgtgtgcgatggcataatccttgggaatccatcggttggccggattggctgccagggtgagtacatttccggtattaccttcgaagaaaggcatatatcccattccgttgagacgggtttcgtcgttcaccgtcgttttttgacctacatagaaaaaagaggtcttgccggttcccttgaacaatacacccaaagtcagattcttgtagcggatttctgcccccaggccgtacatcagcagcggataagtgctgtgtgtcaacggcaccatgtccagcttgtccaccataccgtctccattgatatccttatatttgatgtcaccgggcattacctccccgaaagtctgcttgggactgtatttgatgtcatcttcgtctttaaacagtccgactgcctgatatccgcggatggaattgtacgggaaattattgtattccagatagggatactccagataagcctgctcccagttctgtactttatttttggagtacgtgaaattgccccgtaaggtgaagccgaaatcgggagtgaaatcctgcgtgaagctgatgtttccgtcggcaccgtaacttttcattttacccacattcgcgtatggattggagaccactcctacgaactcgggcacctgtacgcgttgctggaaaataccgttacgctgatcatggaaaatatcgacaacgaaatcgatcttgttattaaacaactttccttcaatacccacattggacttgatggccttttcccacgccaggttatcggctccgatacgtgtctcgccaataatctcgatgtcgggaacaccccaagctgatccggtgccttcgttcacttttgtaaggtaggggaagcggacgtcggtaatccggtcgttacctaccgaaccatacgaagcccttattttaagatagtcgagccaggggagcgcctcttgtataaacttgtagccggtaggtacccagcccaatgcgacggacgggaagaaaccgtattgtctgccgggctggaagttttcggaaccggtatatccgaagttgacgtccagcaggtaagtatccttgtagccataagtaaaccggctggatactccctgatagcgcaagggaatggccgataagttgcttgtagcgtcgtccgtgtctttagaatcgctgatgtaataatagaccagtgcggatgttcggtgatctgtaccgaaaagccggtcataattgagcgtagcctcaaagtggtatttgcggtactggcgggtggacttgctgtacgaggcttttttctcctgtacggtctcctgcatgatgagcgatccgtcgcttgctctgcccagcgcattgtagagggccggctgcacgcttctccgttcattgaagtagctgtggatatcgtatgctccctgtacacgtagtttaagcccgttgatcaattcggaaaagtcctgattgattgccaaagttgatttgcccttgtacacttcgttggcagcctttcccgtatggttgatcatgacataaggcgatgacagctctccggcaccgcgtccgggcagcataccattggagtattgggtggggatggacaatggagtaagccgcgactgtgctccccatatatattcggtattggctacgccgggctgattcaactgggaaaggaatccgtccgaacccaaataaactttcgttgatttggtcaggttcacgtctagattgatacggtaattataggtgttgtagctgacgttcgaactgtatatactgttcttgtctaccttataggccgcactttcgtttttaccgcccaggctcaggaaataacgtgccacatcgctgccgccacgtccgcttacataataagtgtgccgccagaatgttttgttgagtatctcatcctgccagtttacgttgggatagagatcagggtcgagaccgtcgcgtataattcccatttccgtatcgtcatacaaaggtgtttcgttccgtactgctctggcttcgtttgctaactgcgcatactcataagctcccagatatttcggcagacggttgaggacggacagcgtggtgttgaaacgtccggtaatctgaattttgcccgaaagccctttcttggtgttgaccaatacgactccgttggctccccttactccgtacacggcagttgccgacgcatctttcaggatggagaaactttcgacatcggcagggtcgatggtgttgaggtcgccttccagaccgtcaatcagtacaagggcactgctgttggctccgaacgtaccgataccacgtacccagaaatcggcgatattctgaccgggctcgccactgctctgcaaggaaatgacaccggctgccctgcctcccagcaagttactgatggaaggggagggggactggatatctttagtgctgaccgtcgtaatggcacctaccgaactgattttccgctgaacgtttcccagtgcgacgacaaccacttcatcaagggaattgttgtcttcaagtagtgtgaccgttaagtcggttttgggctcgatggccacgtgctccgatggtttgaagccgataaaagaaaatatcattttgtctccataaaccactttcagcttgaaattaccgtcattgtcggttgtggtacctttggagggcttgtctttgatgtataccgatacgccgggcatggatagcttgtccttatccacgacagttcctgaaacggtaaattcctgaacttgctgcgcaaaggttgttgccgaaagcaataagcagaacgacattaagtataaaatctgtttgattttcattgtgagtttactttgttattcgataaccaatttgcgaatgcgtgcattaccccagtctgcaatgtaaatgtctccctgttcattgacagccactccccagggattcttgaataaggactctaccggtcctccgtccttgtatccggcgacgccgggctgtccggcaactgtcgtgacgatattgtcggcagatatcatgcggatgcaatggttgccatagtcggcaacgaacatattgccgtcgttgtcaaacttgatatccttgggataattgaagagggcatcttcaatcggaccgtcgcggaaagcgctgccgccgggagcattgagacgcttaaatccgcctgttccatccggatcgcggaggtcgagcaccgaaatcccttgtctgtatgcggtaggggcgttggagtgaagcgttatatacaaaagccagggcttcgctggattaatcgcctgtccgtattgtgatccgctgggaccttgatggataatgtgtccttcgaatgtgtcggggtctattttagcgatctttccatcacggtatcgtgtatatagatagccgtcataagggcagaaggtgacgaaattcttgtatctgtcggcatctacgattgagttcagatccgcctgtgagtattttatgttacgctggcggggataccaggcttcacgcgggtcgaaggtaaacgtcacttctttgaccgattcgtgcgcggcggtcagcattccggtggcacggtccaccgttaagccgttggcatataagatacggttggcagcatctgcttcaatgagaggagtcacaatgttctgctgttcgtttatccgggcgattccaaatgtaccgccgtcacgccatgacatgaaaagattgccttcggcatccagatcaagatatttgccatacacctgagcggtggagagtgttccggcaaggaagctcgtttcaccgtttccggtgaccgtgctgaccaatgcctgtgtatgataagcatatgtttcttcgtaagcgacggaatcggtgtcgaccactacggagatacggggattatcgcccggaaggcgcggtacaatggcataaatacggcttccgcttgatgaaacgacggaggctctggcattgttgaaatatactttgattttactcacatcggtgccgaagttttttccgtccagaagaattttgtcacgtgctccgccttctttgggatagaaggaggtcagtacaatcggttgatcggattggtgttttttttcggtgggctcactgtagctttcgcaacttgataaatagaagaaagctaccagcgagcaggctagggataagtaacgattcataaagtaataatttaaaattaaatgattatccgcatgtagtccgtcggatatcttgatattacacgctttgatggctggaactttatagtttgatggtgtaatccaaacctttatcgggggctacgatgaagttggtaacttcaaaattgcagtcgcctcttttgataccgttttccaacttcacagagattgtatgctgcgtatgtggtttcaatgtcatttcgcggaaatagaccaaagaaggatcatgtgcggtctttttcagtttcagtaccagatcggtagcgttcatgacagaaaatgtcacttctttttcggtgcgtttcacttcttttatgtctacgcatttttcaaagaagggacggaggatttcttcacgcccgatcaccagttcgcggtaataaacggcagtgcggcgattgtcgagtgcttcacggataccttccggagaacgttctttggcaaagacaaacgtcatcgtgcggtgttcgccttttgaaaaatcatagtctgtctggataggctggtggatatcggaagttcctatcatggtcagattcttgtccagacaccattgaatggcttcgggcatgaaaagaccaccattggctacttcaatgccgtgcatgcagccgtcattgtagagttgtgtatgctcaggccaccacagggtggagtctggctgctggcgtgcccagcccggatgattccagaagataaaggctccttgtttttttgcctcattgaaagcgtctttatatgccttttgttccaatggattggagtcgttcaggaagattgcattaaaatgtcccggaggcatggaacgggtgatttcactgcctctgattagaagtattcctaacttcttcgcctgcttctgagacagttcataagagcggttatgatctgctatgatgtcttttttgtgcgggcggtactctatatgttctgtcagagaaatggcatccagtccttctcgatatgcttcgtctacacgtacggtaggccataccagaccatccgaaaaaacactgtgcatgtgaaagtcacattttaaagtagtgtacccgttcagattgggaacttgaatctcattgcggcgttgcgcttgtgcgctcattaaacacattgctgccagtgcaactcccatcaatacttttttaattttcattttttttgctttaaattagagatttggttttcttttggaatgcctctgtccagtcattggaaaatggtactaaacataggcccctgtgtattttggcgcaaatgtatatgcaaaaaaaagacctgcaataggcgcagtaaaagcttaacgggaacttcacggaaaagaaatgtaatcgttaacgtctgtaaaaaatgtaacgcctttgtaaagtatgagtgtccttgtaaacggacatgagttgttttgtctgtgtggaaataaaaaagaaatggatagccaatttatgcgttacagcataaaattgactatccatttctttgattgagttcctctttatttaagaggctttcttctcttttacatcactgctggcttctaccacattcactacatagtcgcccagtttctcacattcggcgataatatccatgtaatagactcccatctgataatcatattccttgttgttaacatccagaatattctgatttttcagttggttacggtagttattgatttcgttttcgatgttgaaagacttgttgatatcaatgctttggtgttccggtttctctaccactacaatcatttgcgcgagggcatcgtcggtcagcttcatcatgaagtggatgtgctcgtattgcttttcggtaaagtcctgattcgtctggcgtttccggttgatggtgcgtgccaggttgtaacagctgtcgccgatactttcgatttccgtcacttcgcgtagcatggcacgtatctgcaacttactttcagaactcagacggccttcggatacctgattcagataattggctatttcaagttccatgttgtcgctgatgttctcgtacttttctacacggctgaacagcttgttaaagtcatcgtccttttcggtgtgcatcaagtcctgcaccattccgaacatacggtgggtgcgttctgcaaacaggtggatttctttgcgtgcctgcaggatagaaagctctgcagtggaaagcataccacccgtgataaaccgcaggcggggttcttcgtcttcctcctttggccggattagtgcgcataccgtgcgttcgatcagtttcactccccatatcaggatacatacgttacagatattaaagatagagtggaaagcggacagtttataagaaatggctacttccggattattgctctggaagaaggtgtccactacccagttgaccagttccatgaaagggtggaagatgatcaatacccagatcacaccgaacacattaaaaacaaaatgggccaatgctgcccgcttagcctgtgtgttggctgttaatgcggcaagattggccgtgatggtagttccgatgttttcgcccagtacgagcgctgctcccagttccagactgatccagccgttggcgcacataattaatgtgattgccatcgtggcggctgaggcctgtacgatcatagtcagtatggtaccgatgaataagaacaggagaatggagaagaatcccatatccgtgtagttctgtacgaaggcgagcatttccggattggcgttcaggtcgggagcatttgctttcaggtaagaaagtcccatgaagaggaaggaaaaaccgaaaatgaattcaccgatggacttgcggttgctcttgccggagaagatgagcggaagggcgatggccagaagtggaagagcgaaagcggccatgtcaaccttaaatccgaaaattgaaataatccatgccgtaaccgtcgtaccgatattggcacccatgatgacgctgatggactcggccagtgtaagcaaaccggcgttgacgaaactgacgaccattactgttgtcgccgaggaggactggataagggctgtgatcaacactcctgttaatacccccgttacccgattggtggtcatagctgtcaggatacttcgtagcctgtcacctgcgactttttgtaagccctcgctcattattttcatgccataaaggaagagccctaacgagcctatgagctttaaaaaatcataaaaagaatattccatctataataattttagtggttgtttgttctctatctgattactaagtatatttagtcccatgttattcaccttattaaaaagactacgatgaaacagatgttacaaatatgttgcaaaaataataatatttataaagaattccctatcggaagctcacttttggatatttattacggttttaatcttaattttccttatcaggtagtcagtgccaaggtgaataaccgttccgaaggtctcaatttcaaagtatataataacaaggatatagagtttctggatgtgcgcgattcatccggtatgcgtacgtatgtgcggtcactctgctttgtcttgttcaaggctgtcagtgagctttttcccgaaggaaagctgtttgtggaacacccggtatccaaaggttatttttgtaatctgcggatcggtcgccctattacattggaagatgtgacgcgtatcaaacagcgtatgcaggagattatcgcagaaaatatctcttatcaccgcatcgaatgccatacggctgaggccgtgcgtgtgttcagcgaacgcgggatgaatgataaggtgaggctgctcgaaacttccggttcgctatatacctattattatacgctgggcgatacggtcgattattattatggtaatctgctccccagtaccggatatatcaagttgttcgacatcgtaaaatactatgatggcctcttgctgcgcattcccaataaagagaatccggatgtgctggaggaagtggtgaagcaggagaagatgctggatgtatttaaggagtatctcaactggagctatatcatgggacttaataacgccggtgactttaacctcgcctgcgaggaagggcacgctacggatttaatcaatgtagcggaagcattgcaggaaaagaaaatagcccagattgccgatacgatcttccatcgtggggaaaacggcgaccgggtgaaactgattttgatttccggtccgtcctcttcaggaaagaccacgttcagcaaacgtctttccatccagttgatgacgaacgggctcaaacccttcccgatctccttggacaattatttcgtagaccgtgaagagacacctctggatgaaaacggtaactatgattatgagtctctgtatgcgctcgatctggaattgtttaaccagcagttgcaggctttgctgcgcggtgaggaagtggagcttccgcgctttaacttctctctggggaagaaggaatataaaggtgataaactgaaaattgaagataatacgattctcattctggaaggtattcatgcgttgaatccggaactgacaccgcatatcccggatgaaaagaagttcaagatttatgtctcggcattgaccactatttctttggacgatcataactggattcctacgacagacaatcgtttgcttcgccgcattatccgcgactttaattatcggggatattcggcccgcgagaccatctcccgctggcctagtgtgcgtgccggcgaagataaatggatattcccttatcaggagaatgcggatgtgatgttcaattcggcgctgttgtttgaatttgcagtgcttcgcctgcatgcagaacctattttgatgggtgttccgcgcaattgtccggaatattgtgaggcgtaccggttgctgaaattcattaaatatttcgttccggtgcaagataaggaaattcccccgacgtctttactcagggagtttttgggaggaagtagcttcaaatattagataataaatttatttaagagaattattttggaatttatagttattgtataaatataagttcgtaacttcgcgccgcaaaaaacaagcgtggcaatatgttgttgtattccagggaaaggaaataactgtaagattagacttaaataatgaacatttgtacgttctttccgtttatgttattacacagcaaaaaaagggtatatgatattttataacaatttactagcgaaatgctttttagggaaaaagaagcattattttatgataggagggttattctttactcggtacaagtatttggaagtttgggaagaaatggagttaagaatacatgcacggcaattctgggagtgttttttattgactttaatcccagcattgggtttgtcactatggttttcatggtggtggatggtgcttccgttcatgacatatcacttgctttactggtttgaaaaagcaattagttctcattcggtttttaactgggaggcattgacctattgtggtgatgccgtttatatgagaaaaagaaaatcctatgcctggatgaaatggtatgggaagaaaaacttcccgaaatcggaatgggaagactaaaagaatagagaaacgctaaaactctcttgcgaatttattcaggcacggtttacacagattaatatggtttcgattaaaacagaaccgtaaaaactctgtaagccgtgcctgaataatgatatgataacagttacttccgctttcggcgggttttccttttctactgcttttatttcagatgtttctttatccaaagcagatgtccgtactctgtgtcactggaggtccaatgttcattaataggagtgatcaatgcttctttcgggcaattcaatacattatatacaatgtagctggtagtcggtgggcaaacgttatcattgaatccccatgtcatataagtgtccgccttgattaattgggcaaagtttaccacatcataataagccattgttctgattttttcgggagtatccatatctacggtatttcggaagaaatggggataacctccggcacgtccggctttgtaacctgccatatcgcttagagccggatgattggctacgcaggccgttacccgctgatccagtccggcggtgacgagtgctaatgctcctccctggctgccgccttgaacgactacattctttccgtcccattccggcagtgaggtcagtaggtcgatgctgcggacacaggccagatatacccgtttcatgtaatagttgtcgcggctgtccagaccgttggacaggtatccgttttctctgccgttgaaagcggcactgatttctttgaattcttcttcgctcatttccggatttagcccgtggatctcgatttcaaagcggatgcagccttgttcggcgtagtacttatgtcgcaaagggtccttgattgtcttgattcctgcgcccggaggacatagtacgacagggtatttgccttctttcttcggatagaacaggtagccgtagatactttgtccgcgttggttcacctgcagcttgatgagatagcagtctatttggtcggtcgagtatttctttacgtgctctttggtgtatatcagcggaaatttggtcagttccgccttttcgttctcccagaattgctgaaagtcggcaggcatggtggtatacggacggagcttttccggcgagaagcccactttgacgtgatgggagtatttctttccgtctacggtggtggtcaggcggcagtctcggaagcccggtttcttcatggtgcctacggggattgttgcctttccttttctcatgatgactgttcctttggtatcggcaggcatcatttctccgcctatttcgaaattaatcgctatgctatctcccggaatgccgtatttgtaaaactgcacttctacgtttgcctgttctccggttttgtaaagccagtcggcatgatcgggtacggttacccagaatacgtcactccggtagggattgttttcggcaactgcaagcagcgttgtcagtaacaacgctgctgatacacaaaatcttctcatattcattttactgttcaatataactgtcattcgtcttctcattctattttccatctgatcggtttgttaattacgccgcaatattaggaaagattagaaagacagaggtcgataaaatgttctattaagtgtaaatttagagcaacttccactcgaatgtatgttttccggcttctaactctatgacacgttctcctttcacagtatcgggcacatataaagtggcgctgctgttggcagggatcgtcacgctgtacacaacactctttttcttacgtacccattgggaatgaatctctccgtaaggtgaatggtgcctggcctcaaactgttttaaatcactggggaagttggggcgcaggaggatatgtttaaagcccggttgctgcgggtcggggaagataccgcccaagcctttatagaaccatcctccgatttctccgaacatcatgtggttgtccgaaatgtcacgtgtagcattcaaatcccagttttcgagcagggtggtggctccgttggcaatccagcagccccatgacgggtaggtgtcttgtgcggctactttataagcggtttcggcttctccgttttcactcagggcgttcagtatggctttggctcccaatacacccacatccagatggaaaccggcttcttgcaccttcttcgccaggttgcgggctacttttgctttcatatccttggggacaattccccacatcagcggtacacttagttccgtctgaacaccgctggcgtatataccggtttccctgttcagatatttgtcattgatcgcttgtctgatcttttccgcaagcgcctgataatgttcgtaatcttcctgtttgttgaacagcttcgcggcattggccagtattttagtatctacgtagaagtataccgatgaggtcagttctttggacgaatgcgatttcacgggaacccagtctcctcttccccatgaagtcagtccgcttgagctggtacggtctacgtagtctacatatcgtttgatgttttcgtagcagtcggctaataatttgctgtctccgtagaacagataaatattccagggaataatggcgattgtactcgtccagtccagaccgttgtccgtgccgtatccccatcctccggtcggaatgatgtcgggtaatactccgttgggttgctgttcgtcacggtggtcggctagccatttttcgtagactgtgatgccgtcataattatatagtgctgtttctatcgcaaaatgtccgtctcccgtccatccgtttttctcccgttgggggcaatcggtgggataccccatcagattggacaggtaagcgttgttggtagcccaccacaatcggttcacgagtgggtttgacgtatttatctctcctttttgcggaacgtcgctatgaacgaaataagcagtcagactgttttgattgagtgcgacaggcttactgcttgtcacttctacgtatctgaagcctttgtagttgaaccgtgccataaactcgtcttctccctttccgctcagaatgagaatatccgtctggaatgggtctgtgtcatctaccggacgatggtatacgtcaatgtttgacatattcacccgtccgttgtcatagaggcgttcgccgtgtttgagccttactaccgttccttcttctccggataccttgatgcgggtcactccggacatatttctggcaaagtcgaatacatacgttgtgtcgttcactttcttaagcgcttttgccggtattgtttctacgatacgaatcggttgtacctgctgggatacgacgttttgagaagggacggctctgtaacctgcttccttccatttcgaatcgtcaaaatctgccgtattccagcctttctgttccaggcgggcgtcataatgttccgctgtatagatgctgttgaagatcaaggcccccgaagaagtcttccagtctctttcggagcggattacttctgtagtgccgtcttcgtaggtaattctcaggtccatacaaaaagcggggcggttgcgccacggtgcgcggtcaaagtcccagactgcttttgactgatggttgtaccagccattccccaacagtacgccaattgcgtttttacctttctgaagttgcttggtcacatcataagtcacatagaaattccgtctgtcgaaacgggtatacagcgggtctagccgatggtttccgattttctctccgttgatgtataattcgtataaaccggcgacggcgatgtacgctctggcggatttgactttcttttgggtgtcgaatgtttttctgaaatagggggcgggcttatagttgatgtctctgttgtcgccaatccatgcgccctgccagttctccattcccatcattccggtttcgaagctgttgatgtccgaagaagcctttttgccgtccttatcccatacattcactttccagtaatatttggtaaagggttgaagattcttttccggataggtgacaaggatttgatccgattcttttttccccgagttccatgtttccccgttttcgttgtttgctttcagtgagtctgtgctgactattatctgataagcagtctgccgggctccttgtcgggcgtcgtccagcatccacgacaatctgggattggcattgtcgatgcctagcggattgatcaggtggtcgcaatgaaggttcacgggcttgcattcttcttgcttttgtgcaagggtcggttgcagtgcacaacatgcaagtgcagtcactaaatatatttttttcattctgtctatttgttttcctttttaaccacaaactgatatgtaccggactgtagttctaatactgcctttccattcatgaaagtaaccgaagaaactccttccgctttcacggcagcttttccgctttcttctactacatagtcgagagtaggcaatagcaagtgaagagtggcggtggtgttggcaggtattgtcacttggtaagaaactgttccgtcattttcttttttccagctgctcttgatatctccataacaggaagggaacgaagcatttacccagtcaatccgttcctgaccggcggcaacttccgggcggttgtccggaatcggctgtaatacgatgtgcttgaatcccggacgtgtttcgtcgatatctataccgcccattgtgcggtacatccattcggagactgctccatacgagtaatgattgaacgagttcatcgatacggggccaaaacctttctctttggtatacgaatcccagcgttcccagatagtggttgctccctggtctatgctatatagccaggaagggttgttccgttgcagcaatagatcgtaagccgtatttgattctccgaactggcttaatgtctgattcaggatggctgtacccatgaatcctgtgctcagacggttaccgttgccggcaatcttgcggaccagtgtttccactcctttcttccgtgcttcttctgtcgggaataaatccagtttcaaggcaagcagataggccgtctggctcttttgcttcaagtctccgtctgcatcgacgtagcgtgtctggaattctttcttgatttcctgtgccagctttctgtaagcctttgctttggaagcgtaggcgtcacagtcgtccgttttcaatgcttccgaaattttggccatcaattgtgccgtatatgcgtagtagcatacactgacatagcggcgttcggtatcttcgtacgatagccagtcgccataatttgttccggcaccgttatagttataaccgtctcctttttgatgggacaggaactccatgtatttctccatagatgcataattgtcctgcaatatctttttgttgtcgtacatcagatagatagtccagggaacgatgataccggcatcagcccaggctgcctgtccgtagcctacccatgagtgaggagctacatccggataggcgccgtcacttcgctgaccgtcacgcatatctctcatccatttttcgaagaaggcggatacattcgcattataagaagcggcacggcagaacacttgcgtgtctccggtccagcccagacgttcgtctctttgcgggcagtcggtagggatgctcagatagttgcctctttgtccccacatgacattgctgtataactgattgattgatcggctgctggtgacaaacgaagctccctcttcggtagcggaaccgaccacttcccctatcagggaaagtacctcgatgtcttcacttgccgttatctcacaatactgaaaaccgaagaaggtcatagacggatggaatgattcgccttccttgcttcctttcaggatatacttcaatgttgcttttgcacttctgaggttggcggtatatatacttccggcaggaccgtcgtctccgcgcgatttatctcccgtgtcgttcagcatctcgccgaaacggagtttcatctccgttcccgatgcaccttttactttgaaccgaacccagccgaccatgttctgacctaagttgtagacggccgtttcacctttctttagccggataggagccggtttgtccgtaacactcactacattgattttaccgtctttttcaccttggtaaacagtggtggacaaagggatacggctcagatgcggacgcacctgaacggtggggccggcaaaggcgattaactctccattgaaatgagggttgacagccgtcttgttccagttggcagtattatatccgggcttcgtccatgcactttctttgcgggcgtcataggtttctccgtggtagatgtctcccattcgtatggcaccgtccatggatgacagccaggaaaggtccgttactaccgtttccgaagtgccgtccgtatatttcagtaaaatctttgcgatgaatcctacttcgtgggcgccatactctccatgagcgacatcactgttccaccagccggaggatacctgggcgccgactgcgttttctcctttccggagcaaatcggtgatgtcatacgtctgatagtgagctgttttgctgaaatccgtccattccggcttcaattcgtcatagcgtatgctgccgtcttccatcttgtttcctacccgttgtccgttgataaacaaatcatagacgcccagagccgaactgtagatgcgggcggatgctatcttcttttttgccttgaattctttacggaacatgggtactctgctcatagaagcctgcaatacccgatagtctccggaagcggaaaccatattcagtttacgattacctcccacagttacgatttctccttcttcaaaggtggactgaggtttttcgaaatcctctttcagaacaactttggcttcttccttgtcgcctttctgttcgtactctgtcagtacgatattgtcaaacatggccgtttcgttggtgttattaccgttgaatgcccggaagccgatatatccgttcgatagtttggaatcggtgtcggtataggtatccaccagtaccttgtcaatataagtcttgaccactccatcttttgcttcgattgccagatggtgttctttattcagcaagtcggatttggtgaagaatttgccaatcggagtatccgaactttgcaagcgtcctccgtcataaatatgtcttctgatcaaaggttctttttcattgtccagcgtattgacagaccacatgaatacgttggaagcatcgcgtgcgccgaaaagaacggatgcgttgccggaagtcagtgtgacatccatttccagcagcattcgtgcctttgtctgtttcttgtcttccggattgattttggaattcttgtttatttgagttgccttgatccattgcgctcccgaccatccgtcggacagcagtcctgtttcgaagaaagccttttccgtcgaagtctcttctccggttttgttgttccacacggttactttccaataatagcgggtggaaggggtgagagccggtcctgcataacagatgtgcaatgattcgtcagatgccacctttccggaagtccagaccggatttagacaggctgcatcggtcgctaccgtgatttgataggctgtttgtctgactcctctttccgctgactctagttgccagctgaatcggggagctgttatgtccagcccgataggattggtcagatattcaacctgtagttttttgattgctgcattcgtgggcagcagaaaaagaatagataaaagtaacaaagtagttcgtgccattagtttaaagtattaatagtttgttatgatgggggatacttgcaaatatagtgcttattgtcttggatagacataagaattttgacactaatacttaaaaatatgaccgtccccttgaaataataaatgcctatacttgttgtagtacaggcatttatcgttttatgtgaattccggtgccatctgtgaataaagcaggggttatcttaaagcttccacttcttcgggtgtcagcggaattttcttgccgagtcggcgggcacctgtctccgtgatgagataatcttcttcgttgcggataccgccgaagtctttgtaagtttccactttgtcgtaattgataaaatcggtgaacttcttttctgctctccacatatcgatcagttcggggatgaagtaaatgcccggttctacggtatgtacgaatcccggttccagtggaatggcgaggcgttgcgacttgcgtccgaactgcgtgctcttcggctgaccgttgtatcctacccatatctcacccagattttccatatcgtgaacatccagtcccatcatgtgtcctaatccgtgcggatagaacagggcatgcgcgccttcgcggacagcatcttccgtatttcctttcattagtccgagagttttcatgccgtctaccatgacgcgggcggacaattcgtatacatccatataaggaatgcccggacgaagcgccttgacagattccagatgcatcgcattctggatttcgtaaacttcgcgctggcgggttgtaaatttcttatccgcaggaatcgtggacgacatatcgcctgcataacccgactcgacttccgcacctgcgtcaatcaggaacagatcgcccggtttcactttatttccgtgataatggttgtgcagcgtctgcccgttgatggtggcgatcgttgcaaacgacagttcgcagttgttggactctgccacgcgattcatttccgctactacttcatattcgtacattcccggacgaagcaccttcatggcggtgatgtgcatatcggcagtcacgtcacaggctttttctatttctacgatttcttccgccgacttgtagttgcgctgagctatgacggcacggatgaaaggtacggaaccttcctgacgtgcaggtggtattccgagccagtccatcagtttcagtttatgttcggggcggtagggaggaagataatgaattgcttttccactctggacgcatttgtgcagatagccgacgatatcggcggaagccatcatttccctgatgccgacgcgttcgcatttttcgcgtaacgtaggctgtgagcccatccatacgatggcatcgatggataattcgtcaccgaaaataatttctttgtcttcgtcaatatcgatgatggccgaaagtccggcacacgaaagaccgaaataataaagaaaagtggagtcctgacgataacggaacgtgttatcctcataattcagcccgcactcgtcatttcccagaaataacaaaactccggagcctaaattctttttcagcagggctctgcgctgcatatacgtctctttggcaaacatactgtcctaatttttaagttcgtgcaacaaagatataataaagaatgaaatattacataatcaacaagtgacaattaaactgcgacttacatagaaaattctttttctaattcctttgttacagctctgttgataaattcattaatagtagtacctgcgttagcggcggctgttgctaccattccgtgcaggtcggaaggcatacgtaggactaattttccactatacggtttacttggctccactccacgatctttgcaacttgccaaatagtcgtcaatagccccttcaaagtcactctttaattcactgatggtttcaccttcgtaagtgatgcaatcttttttaagaccgagaactttaccgaacaggcaattatcttcttcgttgtattctacgctaccagcgtaacctttgtactttaactgtcccataattactttattctttactttgttcatatttctcaatcagcttgttctcacggatataagcaagtaactgcttcatcacgtatcctttaataatattagacggatgcggcttatgcatgatatacgagcttttgttatcagcgcttataaattcaacccgtgaaccagaagtatttcctttttttccttcactataaccaaataacccaaataaccgttttacttcatcgtaagtgaagttcttaggcaatgtaaggaaacgttctattagcttttcttttgtacccataatgtataatggtttatgcaaagatactaaatttagtatcatgctcaagtgctggcttttctttttattaattgatactgatatttaacattaaagcaaagtagataacagtgattttgaacttaatttgttgtaaattaagatttaatctcttatcaatctgtgttcttttctacaatgattttaggtaatacaatcttaacctcttgtttgtctttccgtctttcccaatatactacgaagttgacagctgcctctttaagtctatatccttttttatctaactcttcaagtgtattttggaattttctggagaaacgtaatatctcgttaccatgaaagtctgtacagccatttgcttttagctgtaaaggcattccactttttagattatatatagcggcctgacaatatgaggaaataaatgtgtctagatttaaatctttgtgagttaataaataacatagtctttgaggtataggatattgattgttgtcagtccgaatttctgttagtccattgacaatattattaaaataatgtccatttagatggatagatatgttttgttttgcacgagtgatggcaacatatatttcacgtttcttttcatctgagagtgagttaccattgttaaggagtaaaaagacattgtcgaactcctttccttttgctttgtggatggtggagacaataactgtttcaccttgagctgaataaaagtcttctagattggattcaaatagataggttttccagtccgacaaatactttcgggagtagatttgttcgaaagtaagtatgatggaacgacatatttcccacgaagaagtattgccgaattcgtatttcagctttctcttagctacttcccatcgttcattgtcgataatatgggtatccttagtaagatttagtacttgggtgaaatagcggatttcatttaaatcgcctaaataaaaattactgctattcgtttgaactagtttggtggctataccctgttcctgtaagaggcatgatataaaaactgcttcttcgtttgttttggtgagtacaccagtcgtgcctgcaagcgggctttcaactacatcctttattaaaggaataattaaattgtttgatgggtagtaggtgatacgaagcgaaccattctccggttgatgagagacaataggattgtgcttcatccgatgaggtatttgattgacaaatgaatttgcgaatgtcacaagattgcttttacttctgaagttttcatataactcataaaagcgtgcttggtatttgctgatgaggtattgcatatatttggagtctgatttacgaaaggaatagatgttttgatcatcatctcctacagctatgacctttagagtttcatttttatctataagagcagtaatgagattgaattcatcctctgtcatatcttgtgcttcatcaattacaagtacgcttttggtgatacggcttatttcaacttcatcattcttgattttgtctattgtatctttaatgacagattctgatttctcaatcgaacctagtttgcctaataagtcgaaacaataggagtgaaaggtctttatttcaatgtaacctactgcatttcctattaaatcatgaagcctttttcggaattcactagctgctgctcgtgagaaggtaagcatgagtaactgttcatgttttacgtcttccattaataacagagaagccagtttatgtacgagtaaacgggttttgccacttcccggaccagctgcgacaacaatgtgtcccggctgattgtcattaataatatttagttggctttcggatagctctccgaacaattgcttgtatttggttggagtgattcgtctgctaatctcttcttttcgtcctcctggaaaatatttttgaatgaaagacatattgttcaacctgaaatagtcatcaacgaatcgctgtgcttcttggttgttttggctcatttttcgtgcatattctcctacaatgtgaatcttttgtgttttgttactatagaatttttctagtttgcgataatcgtcctgcttataccgtatatttgtgtctcccaatcgtttaatcgtcattcggttgtatatgactagaaatccaccttctatttgcagagctcctatccgggaaaggtaaaaaagcgtatcttctatatcttcgagagtagtcagttcttgaaacaatacttgttgtttttcatagctttcttttaattctactacggaaaattcaacgagaatttcatctcttttagctgaaccagtttctgattcagttttttcatataggtaatttattataaactcggataaaagatgtctgtcctttgtttttttatcaaatgaagtattggaggatgaacaccgataaatagcacgatagtttctattatcatctttgtgtgaacgtataatccagttcttttcacaccagaaatttatgagtgtttttaatttgtcaagactaatctctttttttatttcaatttctgcttgttcacgtaattctttcaagttaaataacttctcttcttcattaaactgtgtgaggaggaaatcttccaaacagttgtatagtctggtgatttcaagagaacggtttcgctgctcttttttgattatataagcagtgagatcctgattgtcagccaatatcttttcgtcacggagtaaagttattatctggatgacttcatcattggggatacctaaatgatcggagatataatcaatacgggcctccggtgcttcatcatttgcatactttcgacttttggttgatatgagctttttaatgatgcgaatagcttgcgttttttgtttttcattgaagcgaggagacaggttaattttatcaatagcttcctgaactgtatttgccaatatactgtcggcaaatacacgtggaatattttgtccacggcgtaaatatccggattcttcaagtgctgctatggccgtggtcacacgagtttctatgttggtgacattctcatcccatccggctctacgagctatctctaaagctgactgcgaaacagtcgggcgcaagcgagtgttattttttatagctttccagacctgttgtatttctccgatatgtaacttcgtttgattaagcaggatgaaatgctttgttaaatcttcttcgtcaaaaagaatataacaagaggcttcgatattctcgtctcggccagctctgcccgattcctgtacataattctcaagtgaatcggatatttcataatggactacgagtcctacatcttttttgtctactcccattccgaaagcagaagtggctaccataatttgtacgatgccggagatgaaatcgttttggttttctgttttatccttaatgtccatttttccatggaaagctctaacggaaaaaccgtcttgctttaaacgcgctgcgagggtggaagctgttcttgtgcgtgctacataaataattgtcgggcatttctttaactcaataatctcccttagacacgtatatttctcttcttgctgacttttttggaatacttgatattcaaggttggtccggtaactgttggagcgaaataattctaactgtatatttagcttttctttgaaataaatggaaatatcctcaatcacttcctgtttggctgttgctgtgaaacaagagacgggtattggttgtaccaaaccttttttcagttgtagttgtctgatataatcacctatgtagagatagtcaacacggaaatcttgtccccatgaagaaaaacaatgtgcttcatcaattacaaaacgaacaattttacgtcccaataataatctttcaacctcaaatccgcaactaagcccttgaacgtccttattgcgtttacacgtcctctcattactgaatttgcagataatttgaacttgaagcacccacttctgcctacaatatccccttaccccacaatgtgacttgaggcaatacacaatatcattcccataagttgtaggcattatccaaaatcagtctggaaaacatctgcgtaagcattattacaggtatagatgttcagcacataccgccttgatgtcctgatccacttggctggtacagagataaacctgaagacaaacgcttttatgcgacttgttgcattgagcccgaacttctttacgtcaagtctttgaataatggccttgtaaaagttacggataagtgctgtaagaagaaggaacactgtgttctctgccatgaaggatttgggcaatctgtcccacccgaaaccattgttcatatcatcgaagatacgttcctttcctccacgaaggttatagaactcgacaatttctcttacggaagaatcatagtcgttagtcaggatacaacggtatgtgtattctccttcccaaaaatcctgcacaccatccatccgtttctgtctttgaatcacaagtcgatatgccttacctttccacttctcaacaaggatagagttcaattcaaactcaatgccattgatttcctcagttttccagcctttgagagcaaaggtgtcattgtagatcgaactgcagcggttagcacggatatagaaggacttgcagtgtttttctatttcctccacgatttcctcggaacatgatccacaatcagctctgaagcgattgatagtgagcccattctgttcaaatctcgcaaagaacctcttcagcgtgtccttctgatggaaacgaacatttgtgttaccatcgctattctctataccgactatcaaatcgccaataaccgccacgccagggcgataaccaaggaacttcttgtatgtaggctttgcatcatacttctctgtctctatgaactgatggtcgaaatcaacatcatacatctcaccctctttcagttggccagatgcaaatatacaattgagcaataaagtattgagagtgtcagccgtattgaaatcgtaggtcttgcccatatctgatgtgtatgaaatgttttcttgcgtcaactcctttatcgccctgaggatagtatcagagctacaagtgcgaagtgtcggatgaagcgagaggtggttcatcaaatgagtagtgacatcctcaatacatgaaccgctacagaagtagatactcatgagagaacggatgatttcgctgtactgataaccgaacgatctacaccttagaccgagggttgagtcgattacagatgataatgtggagtcaaattgctccatgattgaaaataatcccccaaaaggagtgagtctctcagatttaatttgtatcttcgccatgtctatcgtcggattctcttgttttttttgcaacactaagataagtgaaaattctgacatggcaaaatcctgagcaactttttgttgctcaggtacttaaaaagtttaatttataatagtgttgcggaattaaggttcaattgattttgaccgtaatgattcgggagatatataaagaatggaagcagttccgttttcaactctttcaaaagattcagaacgttctataggatcaagcaaaccattgatagtgactgcatctgtaatggaatattttcgtaggttgtccacttgatctttcattaaagactgtagaggagaaataactactgtgagtcctttaactaattctccactcattaatgccgggacttgaaaagtgatagattttcctcctcctgtagggaagattgcgaggagtgatttaccttttaaagcagcttttactgcgtcttcttgcaaagattgattgttgtaagttcgataagaatcaaaaccaaagaaagtttttaatcctttatgtgcgtcaaaaacctgattacaaaaatcacatccagtcaagcaaggagtattacgtaatgcatacatgattgactctactttcgggtgcgaatgcagtacccaaggtggggtaatagagtagcgatctttacaattgattagggcaaggcaataagctaattcgacaggagattggttgatatagtttgtaagtggggcatacttacataaatcaccgtcaaatctgcggtttatgatagcatctaaatcctcctgctgcttttcgtagttataagtaatataatcaaaaaagtaaccgaactctttggtatgatataatagtgcaaaatagatatcctttaaatctttgtccagacaattaaatgcttctacctcagagaggaatagctcttgtgctttgattgaatcatttagtgggttgctgaggctttctgtttgtaatttgtcgtctttcaataaatgatggtaaggtcttgccggaaataataaaggcgagagatagagagtgtctattactttggggtgtttgtatccgacttgcgcaaataaaggcgaaatatattgaagatcatgattcaagatgttatgtccgcctatatattctgtttgtgcaatgaattgcattaaatctttgggcgagttgcaatgaaaagaagctccgtcatggcgaatagctcctatatccaaaatctgacgattagttggattaatttcaaggtcaataaaggtgatatttgtcatgcctgttttttttaatcaactgttcaaagataatactaatttacaaaagtataatgaacttcatagaataaatatttgtttaatttataaattactgtgataggattaaaaataatcccactaatctgtgtaatctctcgttaaaaagttacttttgtagcgagaaacagtagaaagcaaaaacgaatatggcacaaggttcccgtcaaatacaatcgcaggcgcaacagcagatacaaacgctctcgccacagcagattctggtcgtgaagttgttggagcttcccgcagtcgagctggaagaccgtatccatgctgaactattggaaaatccggcgcttgaagaaggcaaagaagacgctgctacagatgaatatgccgatggcgtcagtccggaagaaggcatggataacgatgccaatgattatgattctttaagtgattatctcaccgaagacgatatccccgactataaattgcaggaaaacaaccgctcgagggacgagcaggcggaagatattcctttctccgacgccacctctttttatgaaatcctgaaagaacaactccgtgaacgtaacctgaccgagcaccagtgcgaactggtggaatatctgatcggttcgttggacgatgacggactgctccgtaaatcgctggaaagtatctgtgacgaactggctatctacgccggtatcgaatctacggaagaagaactggaagaggctctgtgcatcctgcaggattttgacccggcaggtatcggagcacgcaaccttcaggaatgtctgatgatacagattctgcgcaagaagagcgaagagaagaagccgtcaccgatattgaacctggaagagcgcatcatcagtgactgttatgaagaatttacccggaagcactgggagaaaatcattaagaaactggatgtcagagaagagactttcaatgaggcgattgccgaaataaccaagttgaatccccgtccgggtgcttcgctcggagaaaccatcggaagaaacctacagcagattgttcccgattttctggtggatacctacgatgacggaacgattaacgtaagcctgaataaccgcaatgttcccgaactccggatgagccgcgactttaccgagatggtggaagagcataccaaaaataaggcgaaccagtccaaagagtcgaaagaagccatgatgttcctgaaacagaagatggatgcggcacaaggatttatcgatgcggtgaagcagcggcagaatacattgatgactaccatgcaggcgattatcgacttacagcgtcctttcttcctcgaaggcgacgagtcattgctgaaaccgatgattctcaaagatgtggcagaacgtaccggactggatatctctacgatttcccgtgtcagtaacagcaaatacgtacagaccaacttcggcatctatccgcttaaattcttcttcagcgatggctatacgacggaagacggagaggaaatgtccgtacgcgagatacgtaagattctgaaagaatgcattgacggagaagacaaaaagaaaccgctgacagatgacgaactggcggatatcctgaaggaaaaaggctatcctatcgcccgccgtacggtggcgaaataccgtcagcagttgaatataccggtggcaagactgagaaagtgagtttaaagtattaactataaagtattaagtattagtgctgatggataaagaaaaagagcatatcatagcggataaaacaatgttgcgggtggcacggatcacctccatcgtgtttactccattttctataccgtttctggcgtttctggtgttattcctgttttcttatctccgtatcatgccgatactttataagggaattgtgttgggaatcgtttactgcttcaccatactgacgcccactatcaccattttcctgttccggaagatcaacgggtttgcccgtcaggaactgagtgagcgtaagaaacgttatgtacctatcctgctgactatcatttcgtatgtgttctgcctgctgatgatgcggaaactgaatattccctggtatatgaccggaatcatttttgtttccctggtgatatcgatcatctgcattctggtcaatctgaaatggaaactgagcgaacacatggcggggatgggcggtattatcggcggactggtttcgttcagtgcgctgttcagctataatccggtagtgtggttgtgcctgtttattctgattgcaggcatattgggctcggcgcggattgtgctggggcatcacaccttgggcgaggtcctttccggttttgtagtcgggctggtctgctcttttttgatactccatccggcgtacaaccttatattcagagtatttttattttaaaaacaatataaatcctaaaaactaattattatgaactttccacagaacttgaagtacacgaatgaacacgagtggattcgcgtagaaggagacatcgcttacgtaggtatcacagattacgcacaggaacaattgggcgatattgtattcgttgatattcctaccgtaggagaaacgttggaagccggagaaactttcggaacgattgaagtggtaaagaccatttccgatcttttcttaccgttggcaggcgagatactcgaacagaacgaagctttggaagaaaatccggagctggtaaacaaagatccttacggcgaaggctggctgatcaagatgaagcctgctgatgccagtgctgcggaagacctgctcgatgccgaagcatacaaggcagtggtcaacggctgaatttgaataaacagtacttctgcctcaatggaagctgactaaatagtcgttagtaactccaactctcctcctgctggaaggaggagtccccgtaggggggggtggtaggtaaatgaatgtatgtaataacttttagattagatgaaaatgactccaattgtaagtatcatcatgggtagcacgtccgaccttcctgttatggagaaggctgcgcaactgctgaatgatatgcatgtaccgttcgaaatgaacgccctttctgctcaccgcacgccggaggctgtggaagagtttgccaaaaatgcccgtagccgtggcattaaagtaatcatcgctgctgccggaatggctgccgcccttccgggtgtcatcgcagccaacacaacgcttccggtgatcggagtacctgtaaaaggctctgtgctcgacggtgtagacgctctgtactccatcattcagatgcctccgggcattcctgtggctacggttgctatcaatggagcgatgaatgcggctatccttgccattcagatgcttgcgttgagcgatgcggcattggctgaggcttttgctgcttacaaagaaggactgaaaaagaaaatcgtaaaggcaaacgaagaactgaaagaagtgaagttcgaatataaaactaattaattgacaattgacaattgacaattgacaatgggctggcgctgtgggtgctttgttgagcttgttgttgattctcgattctcaattgtcaattgtcaactgtcaattgtcaattgaaaagatggatttattcaattactttcgaagagaaacatccgaagtaaatattggggctgtacctttgggcggccccaatcctattcgtatccagtcgatgacgaacacgtccactatggatacagaagcttgtgtggaacaagccaaacgcatcgtcgatgccggcggcgagtatgtacgactgaccacgcagggcgtcaaggaagcggaaaatctgatgaatatcaatatcgggctacgaagtcagggatatatggttccgttggtggccgatgtgcattttaatccgaaagtggccgatgtagcagctcaatatgcagaaaaggtacggatcaatccgggcaactatgtagatgcagcgcgtacttttaagaaactggaatataccgacgaggagtatgcgcaggagatacagaagattcacgaccgttttgtgccgtttctgaatatctgtaaagagaatcatacggctatccgcatcggagtcaatcacggttccctgtctgaccgtatcatgtcccgctacggagacactcccgaagggatggtggaatcctgcatggaatttctgcgtatctgtgtggcggaacatttcacggatgtggtgatttcgatcaaggcttccaatacggtggtgatggtgaagaccgtccgcttgcttgttgccgtgatggaacaggagggaatgtcatttcccctgcatcttggagtgacggaggccggagacggagaagacggacgtataaaatctgccttgggcatcggtgcgctgctttgtgacggattgggagatacgattcgtgtgtcgcttagtgaggctcccgaagcggaaattcccgtagcgcgcaagctggtggattatgttctgttgaggcaggatcatccctatatcccgggtatggaggcaccggaatttaattatctttctccttcgcgccgcaagacgcgggcagtgcggaatatcgggggcgaacatctccctgtcgttattgccgaccgcatggatgggaagacggaagtcaatccgcagtttactccggattatatctatgccggaagaacgttgcccgaacagcgggaagaaggagtggaatatatccttgatgccgatgtatgggaaggggaggccggaacatggcctgctttcaatcatgcgcagttgccgttgatgggcgagtgcggtgcagaactgaaattcctgtttatgccttacatggcgcaaacggatgaagtgattgcctgtcttaaggtgcatcccgaagttgtggttatttctcagagcaatcatccgaaccgcttgggcgagcaccgtgcattggtgcatcaactcatgacggaaggtctggagaatccggttgttttcttccagcattatgcggaggacgaggcggaagatttgcagattaagtccgccgttgatatgggagcattgatttttgacggtttatgtgacgggattttcctgttcaatcaaggaagtctgagtcatgcggtagtagatgctactgccttcggtatcttgcaggcaggacgcacccgtacttctaaaacggaatatatttcttgtccgggctgcggtcgtacgctttatgatctggaaaagacaattgcgcgtatcaaggcggctacctcacatctgaaaggcttgaaaatcggcatcatgggatgtatcgtcaacggtcccggtgagatggcggatgccgactacggctatgtaggtgccggacgcggaaaaatcagcctttataaaggtaaagtttgtgtagagaagaacatacccgaagaagaggcggtggaacggttgctggaatttatccgcaatgaccggaaagaactggaactttaatcagtaatacttttaaatagttaagacaggagttgttttaagtttgcttaaggcaactcctgtcttttattatagtatacacaaacatttatccgtacaaggggaagataaccacctgggattaatagtaggagaaccgttcattaggctattatgtaggttagattaatgtattccgtcagtaagaagaagtcatttcacatacatgggcccatcagtccacgtacgtggtctattgggttcatgtacgtgaaccgaacggtccacgcacgtgaaacgaatacatgaaacgtactaaatatattagtcaaaccttgttagcttgttaaggttactatgctatggcttaatgcaggcggcatacattaagttatatatggcataaacaacgcatattcacgctgaaaatggagtttttaacacatgcagataatgcttctgaatagtctgttttatagttgttaatcagcgtgttaatcctgtttcttattaaaagcaggtgataatagaaaccagaaaaagttctattatcaccttattatcaccacctattatcaccattactgccttaataataaggagcttatcctttaaaagtgacaagtgacaataacaaagtgttttattaactctagtgagagacggttggaagcctaagggcatttttcagccattgcatacagcgcatgacgaaagattcgtgatgcaggtttttggtttgttcttctatctgtatttccatctttcgctgcaattcttccagcaatgcttttcttgttttccgtattatttcctgttctttttcatgtgttatttcttgttcgtccttcgaatgccttttctgattatcccgaagcatgtcaagttggtcgtgcaatattttgtttttcaactgcaacctttggcataattcatcataatcccgtattttatgttctaatatatcccgttccatttttagccggagattgacagactctttggctgtaaacgctccgttattaatcttgcgtcgcaattcgcatacgatagaacggaattctattgctatttcttccggtgtttgcttgtgaaagtcagccagacgttttagcttgtgtccttttacgatggagcagaagatgctacgccttttgttatctataatttgcagtgccaatgctttaacgactatcgggtagaggttgaaacattcgctctgcaagcggatgtagaattctgcttcttcatatttgagcatctcgttcctgatagctttatccatattccggatgagcttttcgtaattggttcttttaagtgccagtgtttcttctaaatccatatcgctttcgttgttttgattgtcttctaaaaacgactgggcgtccatgcactctccctaaaaaaaggatgtggggttagggtaaaaaaaggaaaggcacggacgctgttgtcgtttcactattcgactgaggtgttggctagaccctttagtgatagtgattaacaacagacatccatgccaattttatatatagggatgctatataacaatcagcatggaatatctgttgcatcacttctcactaaattcaagtagccaactttcagtgcgaagaagtaatacgtttatattccaatatttataaaaaacatctttcccctacattcacgtcacgctgacggggagaaaggtgtatgcaaagataagtgtttattctgaaatctcaacgaaaagcggggatttcttcacatacgactatctccatgccacgatagacgaccactattttgtggagcgtcgttgtgccgatagctttttgtactgtttcgctggcggcatagctgaatcggattcaagcaagtatcctgcttcgagaaggaaaaattaaagtttggccgttggctggatgtggtggattatgagttattgatttagttttctggtgacttatcattcattttttcttcaagtagtttgagtagttcgttgcaagcagtatccatgtattctttgccttcttctgccaaaacatccggattataaggcagtttcacagaattgggaatgatatcacagcttacttcacatccatctgacaagtattgaatataaatacagaatgggaaatcaaaagtattatcgcctgcatatcggcaatgattaaaatgaaaagttactgcatcatattttagcttaaagtagtcaaccagagatttcttggataaacgtatgatatcctctacaaagccatactcttttgacttagtatataaaatgtgtgactggataattggctcatcaggattgggtgtatttatttttctagccatgttccaagtgggagtgttggttataaatgttctgtcaaatagcttttggagtccactgatcttttgctccacataaacggccaattcaaaaaaagcacttcttgcctgttctacggaacggctgcttttttcgatagccttatctgagtatctacgctgtaacatcgctattttcttttcgaaatcaccttcttcctctatgctttctcccttggcggctttgattgcgagtgtcagactgcgtatcaagcaactgctcaaatagttgacgaatggtaatatatcattcaaagtggcattagcaccatctgaaggggttaatcctgcttctacatcacattgatggaggatgttcagatagttggatttatcttcggagtgaataacgatcatcggatatccataacggtgcagcacaaagtttactaataaacgggcaatgcgtccgttgccatcttcgaagggatgaatgcggatataacggtaatgaagcaacgcagccaattcaacaggagtcagtattcctttgtctgcttccaggttgtaccagtctaccaaactcgtcataaatgccggagtttcttcgggcgaagcataactgaaaacttctcctgttgcggtcagtacggaattggggcgtgatttatattcgcctacttttatctgcatacggatgtcttgtccgtcgggtgttttggcgttcttccaatagtcctgcacaaggatggtacggttcaactcgcgaataaaactttcagtcagcggacgttctttgtcttgcgcctcttgctttatcatttccagtcctacgttgtgagctttcatctcttcataatctttcaagctggcattacccgaagtttcaccgaacattaataatagttttgtttgtccgtatgtcagtgtatttccttccaagtggttagagttataattaaactctaacttgaatttatcattccaacgtttcaggtcctcaggcttaagaggctgaagcgatttccattcgctatataattgttttatattacttattcccatttatatatgtggggctgtgcccatttttttgtttagatacaaaaataggaaactttctttatatgccaatcccttgaacgatatttatttggagattggctatggcatcttcttttgcaactttgttgcacgaatcattcgctacctttgcagcagataaaaaagaaagaatgattatgggacattgtagttgttgcgcacatacacacgaatgtgcacccgaaaaacatattgaaaagaaagaatcaatattcgctgaatattggaaagtgggactttcatttatcctgttgataagtggaatcatcatgaacgctctggagttacctttcttccgtgaaggatatttctctctgatatggtatgtcgtggcttatcttccggtcggcctgcccgttatgaaagaggcttgggagagtatgaaggataaggactatttcagtgagtttacgctgatgtttgtagctacgcttggagcgttttatatcggtgaatatccggagggagtagcggtgatgttgttttactccgtcggagaactgtttcaggagaaggctgttgataaggcgaagcgtaatatcggagctctgctggatgtccgtccggaagaagcggcagtagtcagagatgaacgtgtcgttattgagaatcctcaaagcgtaaaagtaggagaaacaattgaaataaagacaggaggaagagttcctttggatggaatgatgctcaatgaggtagctgctttcaatacggcagcattgacaggcgagagtgtcccccgaagtatccggatgggtgaggaagtacttgccggaatgattgttaccgataaagtaatccgtatcaaggtgatcagaccttttgataaaagtgctcttgcccgtattctggaacttgttcagaatgcctccgaacgcaaagcaccggcagaactgtttatccgtaaatttgcccgtgtttatactccgattgtgatagggctggcggttctgattgttttactgccgtttatttattccttgatcactccccagttcttatttacttttaatgactggctgtacagggctttggtctttcttgtgatttcatgcccgtgcgctttggtggtcagtattccgttaggatacttcggaggcatcggggcagcttcccggttgggaattttatttaaaggtggaaattatctggatgctgttacgaagattaatacagtcgtgtttgataagacgggaacccttactaaaggtacgtttgaagtgcagtcttgtaactgtgaatccggtgtatccgaagaagaattaatccggatgatagcctcggtagaaagcagcagtacacatcccattgctaaggctgtggtgaattatgccggacggcgggatatcgagctttcctctgtaaccgacagtaaggagtatgcaggtctcggactggaagctgccgtaaatggaattcaggttttggcaggtaatgggcgtttgctttcaaaatttcagatagaatatccacccgaacttctttccatcacagatacgatcgttgtctgtgcgataggaaacaagtatgccggttatctgctattatccgacagtctgaaagaggatgcaaggatcgccatccagaacctgaaagcattgggaattcaaaacattcagatattatccggtgataaacaaagtattgttagtaactttgcagagaagctgggtatttcggaagcctatggtgatctgctccccgacggaaaagtgaagcatttggaagaattgcgccaacatacggagaaccaggttgcctttgtgggtgacggtatgaatgatgctccggtactggctttaagtaatgtaggtattgccatgggcggactaggcagtgatgcggctattgaaacggctgatgtggtgatacagaccgaccagccttccaaagtggctgaagcgataaaggtaggaaaactgacgcgaaggattgtatggcagaatatttcactggcgtttggtgtgaaactgctggtactgattttgggagccggtggactggctacactttgggaagctgttttcgctgatgttggtgtagcactgattgctatcatgaatgccgtaaggatacagaaaatgataaaataaaagaatatggaagaaaaagtttatctggataagttggcaaaaagagacatcaagccgacggctatcagacttctcatattgaaaagtatgatggaagcggggcgtgccgtgtctcagcttgatcttgaaacgttgctggatacggttgataaatcgactatatcccgtacaatcacgctttttttgtctcatcatctgatacatagcatagacgacggaagcggttcgtggaagtatgccgtttgcgatgattcctgcaactgtgtcctgaaagacttgcattcacatttttattgcgagaaatgccatcggacattttgtttggaaaagattcatattccggttatcgacttaccgaaaggattcactttgcatagtgtgaattatgtagtaaagggagtgtgtgcggagtgctcaaaagtgtaggattaattgcagacaagcagtaatggtaaaagaaaaacaccggaactcgaacggaaaaatatcgttgagttccggtgtttattatattaatgatactggttagtcaatattgggattcagagaatgccagtctttgattgccgggatgatccccatttcaatcacttcatcgcgaagtttgcacagatgttcgtagctcttttccagttcttcctgttcggaaggagatccggccacttctttgtaagtaacgccatctttcgtaatggaagtttccatagccatcatgatgtggtcgaatttaccattggaaacataagtaccggcaggccagcggaacggttgtccacccattgcggcagcgatcatttcgatagaaagataagccgggctttggaaagaagaacggccacgaagatcgatgatatgtttgccaccctgtatgacacgtacttttaatgcttcccattctgtcagcggaagacgggtagttccgatgaaatcagtcagcggttcgccttttactttggtagttgaggcgaatacggccatctgttctccatgtccgccatacgtacggcagttttgaatgtcggaagcgggaatatggaaatatttcaccagttcattctgtagacgggtgctgtccagtgctgccagtgtagaaacctgggatggtttcagaccggaatatagcagtgtgatcaatcctgtgatatcagcagggttaaagatgacaacgatatgttttacattcggacagtattggcggacatctttaccgaactgagcggcaatttcagcatttcctttcaacaagtcttcacgggtcatgcctgctttgcgggctgcaccaccggaagatacgatataagaggctcctgtcaatgcttctttaatatcggaagtataagtcagattcacgccttcgaaaccgcagtgatataattcttctgccacgccttccagagcgggtgcgaaaggatcatatagacaaatattcggagtgagtttcatcatcatagctgtttgagccatattggagccgatcattccggctgctcctacaatcgtaagtttctcgttggttaaaaattccataattatatatgtttaaagatgaataatctgttcttgcttattaccgctacaaagataacgacttaatcggatgattgttcattgaaaaaagttttgtttgataacgaaaagttatacctgtctgatgaaagggatgtgcctaaaatagattatctttgctcattatataataaatagataaaagtatgagtatcgaattaggaaaattcaaccaactcgaagtggtaaaggaagtcgatttcggtttgtatctcgacggaggagatgaaggtgaaatcctgctgcccacccgttatgtacccgaagactgtaaggtaggggatatgttgaatgtatttctttatctggatattgacgaaagactgattgccacaacactgactccgttggtgcaggtagggcagttcgcctgtctcgaagtttcttgggtgaaccagttcggggcattcctcaactggggattgatgaaagacttatttgtacccttcagtgagcagaagatgaaaatgcaggtgggaagatcctacgtggtccatgctcatgtagatgaggaaagttatcgtattgtagcttcggcgaaggtagaacgctatctgtcgaaagatatacccgattatgctccgggtgcggaagtggatatcctgatctggcagaagacggacttgggtttcaaagcgattatagacaataagtatagcgggttgctgtatgaaaatgaaatattccgtgcgttggagaccggtatgcagatgaaggcgtttgtgaaacaggtacgcgaagatggtaaggtggacctgatacttcagaaaccgggatttgagaaagtcgatgatttctcgaagacactgttggagtatattcgggaacatggcggacggatcaatctgaacgataaaagtcctgcggaggatatctacgatacctttggtgtcagcaagaaaacttttaagaaaggtgtaggtgacttgtataagaaacgattgatttctttgcatgagaacggcatcactttggcagaatcctaaacagaatagggaaatccctatgcaggaatagagagaatcattggggtggggagttttctcaccctatttttgtgatatcagttaaagacaataattttaaaaacagataagctatgcgtaagataataataagtttctgtattttgctcgctgccctttctttaaaagcgcagtctgtcagcggaatccggattgatggcggagatactccgattcttgtttattttggcggaaggcagatgtgttatcctactactacttgtttcgttgccaatctgaaaccgggaaattatactattgaagtgtacgcttcccgcccgactcgcccgggagaacgtgtatggaaaggagaacggttgtataatgaccgcgtttactttaacggaaacgaagtaaaagatattattgtagaggaacgtggagatatccgtccgggcagacccggaagaccgggaaccggtcagggtggacaccgtccggactataaccgctacgacagagtgatgaatgaccaacttttcaagaagttctttgatagtgtgaagaatgagccttttgaaaaagatcgtatggggttgattacaactgcattggcgaactctgattttacatcggagcagtgtcttcaattggtgaagttctatacctttgataatgaacggctgaagattatgaaaatgatgtatcctaatattgtagataaagaggctttctttacagtgatcggtactcttacattctccagtaataagaccaaaatgaacgatttcatcaaggaatacgaaggacgctgatcatacattagttcactaaaaacgatacggttatgaaaaatatacatataatcctgtttttcacgttgtgggtaatactcggtagctgttctacttattacgtatccaacaagcaagtgatggaagttcagcagggaatgtcacggcagaatgtagaaaaaatcttgggcaaaccggattacagacgttttgacggagatggcgaggaatgggagtaccaccggatttcttcagtgctttacggcaactcgatcaagattattgtatattttgcagatggaagagttacgagtatggatacctttaatggtgatgagatacttcttccgccgcctccggttgtgatgtctccttccgttgttgtaaccaatacggatccggttcgtccgccacgctatgaagaaagtccccgtcgcagaacacttatgatgcatgatgaatttgatcgttttcttagtgatttccggatggtgatcatgtctgatgagcagattaaatatatagatgacgttttgttggattgcaattttacttctgcccaatgcggaaagatcattgatcagataagtggttcggatgctcagatgactgtgatgaaacgtatgtatccgcaaatagtggataaagaaaattttgctccggtggtcaataagctcttttcgtcttttgaccgtgacaagatgaaggaatatatccaggcttaccacggtgaccaacgaccgggagacgtaggatatgtacggcccagagctatgagttcagccgattttgaccgtttcttcaatgaatatagaggtaaatcttttgagtctgaccgtaccaggatgctggatgaagttgtacccccttcgggattcacttgtgcccaatgccgtaaattggtggatatgtgtacttttcagacagataaaaagaatatgataaagaaactttatccgaaaatcgcagataagaagaacttctccatactgacagatgttttcacttttgagatggacaagagagagatgagggagtttgcggaatcttacgatagcggacgtaactaaaaaagaatgaaaccatgaaaagaattctatttatattattagtcgtgactgccagtaccactgtaatggcgggaatgagtaccagcaaggtacgtaaggagacacgttttcttactgataagatggcatacgaactggacttgaataatcctcaatataatgacgtgtatgagattaactatgatttcatttattcgcttcgtaatattatggattatgtagtacggggtgatgagtgggcattggatgattactatgaagcgctggatattcgcaacgatgatcttcgttgggtgttgagcgatgcgcaataccgcaggttcctgggagctgagtatttctatcgtcccatttatgtcaccggtggaagatggaatttccggatttatatcaattatccgaatcgtagtttattctattttggtgtaccttatcattatcggacttactgtggtgcacattatcgtccgcatattcatcatgtgagttattatcggggaagatataataatcttgtgcactatcctacgccatatcgggtaagagatcagcgggtattccattcttatcgtcgttcagacttcggttctgtacgtttccgtccgaacacttccgttcgtccgcataatgcacctacccgaccggggacttcgggacgtccgggaacaacgtcacggcctaatacatcaggacgtccgggaaatacttcccgtcctcgtcctgaaacggaccatagaccgtccacttcaggcagaccatctacatcgggcaggccgtccacttccggaagaccttccaactctgaaagaccttcggtcaatgaacgaccgtctattccaaggagaccgtccactccgggcagaaatgataaaccgaacaaggaagtaactccgggcagaggccacaacagaggtgaaggagatcgtcattcaggaagtcgtccgggaacgagtacaagtactccgaattctaatcgtcgtccggaaacgaattcagggtcttcgaattccagtcgccgtccgacaagtagtggtacgagcacaaaccgtggcagcagctccggtaggaacagcaattccggcagtagttccagcagagggaacgtatccggcagatcaacagaaagaagctcatcttcagaaagttcgagaagcaacagcaaccgaggttcttcttcccgttcttcagaaagaggaagcagctcaagaagataaaacctattcctttattaataaattattgctcctcagcggtaggagaactggactccggcgtttcgccgactagactattcagggcgtcgcccgtaacttggatatcggggcggatactatccgcctcgatttcacttattaaccctttcttggcgaggcgtccggcaatcagcttataatagccttccatattctcttttaaccgtccgttttccgcaaaggaactgcggaagtgtttaggcttcgggataatagaagctagaaaaatactttcttcggtcgtgagttgcgaagggcgtttgccgaaataataggcagaggcttcctgaataccataaaccagcggtccccattcggctatgttcagataaacttcatacatacgttctttagaagtcagcctttctgtctctatcagccatacgatgagtgcttcttccaatttgcgggcaaagttcttgttccggttgagaaatacgttttttaccagctgcatggtaattgtgctgcctcctctggcgaaacgttcgacttgcaggtcgtaaatcaaagcttcacgcatcgcatcaggcaaaaagcccttgtggtagaaaaaagctccgtcctcactttgcatgacagacatccgcagcaatggagaaatgctgtccaaaggagtaaaatgttcccatgaaggtccgacaggaaatgttttgaccggtattccgttttcataggcggtatagacaaactcttcactcatttttgaaagagatgttgcaccatattctattatccgaaaatctttttctttcaattcggactcaaacttaaggctgtctagtcgggcaaaatcgatatctaacagaaaatgataagccagctcaccacttgtttttataccttccagattgctgaataagcctttgggcaaagaactgaatagttcgtcggccggaaaccatgatttatctgtggcagcagtgaagtgccattgattttcattcttttctgcccgcagataaggatgaaattttatttggttgaataataccgtcgtcgtactgtccagttccagcgtttgcttgccgatattcatctgatacgtgagttgtccgcgatccagatggatcacttcgggagagagtgctttgtgaaatacatcaagtccgcttactttcgccgtaccgtcaagttgcagttggttttcggtacgattttctttagtcatactataatataaggtatcgaaagtaacttctgctccaaaacggcggttgatatacggtagtgaaactttcttttgctctgtggcaaaaagttctgcctgcagggtatgtacctttctgttcaactctcctgctgctttccattgttgagtcagcgtatcttcttttatcttgatggtggactgaaagcgattgttttcgattgtaaaggtggggatattgactgttacgaaattgctgtctttccgttcggttatattaagttgagtcagttgaccgttttcggggaagaaaccatatattaagtttaatattcggttgatgcgatgggcgtaattggtttctatgaccggctctgtagttgcttccgggtggtgtccggagaatagaaaatcatagttggctgcactgtcccgtttgataaaagcgattgccagtccattcatgtggacgttgcggacttcaatatttcctttcagcagtttccaaaaattcagtctgacattgacagattgtagtgtaagaagggtatcccgttggtcgggaacgatggaaagcccttgcagagtaatttcgctacatcccttcatctgtagattctgataatgaatttgcagtccgtatgtttgttcgatatgagtcgtacgcttgttagttatgctttgcagaagcatattgcggctcaaatagatactgataaggcagataaacaagcctcctccgattgatagaagaagaatactttttttgctgttctttttcatcttttgcctttaataagttattggctgcaaaggtagataatattctgttcaacaagatataagcagtctttttttattagtgtgtccgcttatgagcgtacaactgttcattttcgtacatctcagtttttcttctttccgctgactattaagtatttatctttttggcatgcccattgcatttatatattcgaaggcgggcaacaaaagaaatgaaaaaaaagttcagatagttgcaaccattccatatagacgttccgtctaataaacagaagaacaaaaaaagaaagttgaactaataaaaaatatacaattatgaaaactacagtattattcagaatgatggttttagtggcaatggtagttgccggtatcgccaatacagagttgaaagcacaggacaataacttcattactaatgaagagaaagtagatgatcttgttgtttcgaaggtgatttacagactggatggttctctctatcgtcacatgaaatatgattttacttatgatgatcaaaagagagtaacagctaaagaagctttcaagtgggattcatccactgaaaaatggattccgtatttcaagatcgattatacttattcttctaatgaaatcacattggtatatgcacgttggaataattctcacagagcttatgatgattctgtagaaaagagtgtttatgaactgaatgatgctaatatgccgatcgcgtatatgaactacaagtggaatgactataaatggattgaagaatcagccggcaactgggctatgaatatacagattccggtaacagatgaagcagacttgctgcttgccggaagataacaataccggggattgtgaaattctctttctctcttaaggttttaacaaacgaaaacggtggattacccaaacgagggaatccgccgtttttattgtatctgtctgaaaccggtgctgtttactagattgttctatttaatgagcggcagatattctccatatccttcttctttcattttttctttcgggataaaacgcagcgaagcactattgatacaataccgcaatccgcctttgtcctttggcccgtctgtaaatacatgtcctaaatgcgcatctcctgtcttgctgcgtacttctgtccgtatcattccgtgagtagtatctttcttctctgcgatcagctctttctgaatcggtttggaaaaactgggccatccacaaccggaatcaaatttgtctgtggaaacaaacaacggttctccggtggtgatatctacataaatgccggggcggtgttcattccagaactcgttatggaaagccggctctgtggcatttttctgagtcactgcatactgttcggcagataatttcttacggagagtggcatcatccggtttttgataagttgcggtcttgggagcattcgcttttcgtgccatttcaaataaagccggattgatatggcaatatccgcccggattcttatccagataatcctgatgatagacttctgccggataaaagtttgtcaacggttccacttcaacggcaatcggtttgttgtattgagtggctaatgcctggatcgcctgattgatggtggggagatcggctttattgatataatatataccggttctgtactgtgtaccacgatcgttcccctgtcggttgaggctggtcggatcgattgtctgaaaatagaggttgagcaataaactcagatttacttcttccggatcataaacaaccttcactgtttcggcagcatttgtcttgcccgaacacacctgttcataactgggattggcaacggtgctgttggcatatcccacctgagtactttctacccctctgatttgtttcaggaagtgttcggttccccaaaaacatcctcctgcaaaataaatttccgcttgacttttcattggttttgcaattcctaaaaatacattactaattattagaatcactgcgatgataatatgtttcataactgttggttctttctatagtaacggatgaaccggtggatatgttttagaaatctcttacataaataacaagtgttttttgtgagtttgaaaacatgagtaaagccttaaaaatagaatacttttccgatgtattctatttttaaggctttttgataaatagccggaaatctgttctattctatgatttctcctttatagaaatccagtattttagtacggaacagataatcgtatttagcttgcagtttatccgacagtgctttggtcaggtttagtttcgcttcattgtattccacaaaagtagctttaccgttattgaatttttcgctcatcaaccgaaaagattcttcgttggctttcactgcaacttcgctggagttatatttactttctgcagctactgcattataccaggcttgctggatttctttataaagaactttcttggtgttgtccagttgcaaagcaaggtttgactgttgtaggcgggcagtgcgtacccgattacgagtgctaaaacggttgaagatcggaacgctcaggttgaaagaaatagatttgctcaggttattttttaattgacgggcaaaaccggattctgcttcaccgttgagtgtatagtagctgcttcctagccctgcactgaaagaaagttgggggtagaattcactttgagcgatacgaatgttttttaaactaccttgtaagcgatattctgctgccttgatgccgggcttataggcaatcgcctggatataaatgtcatccggagctgttagtggttcaaatttcagttcttcttttgggttctcaagaacgaacccttccggtgtaggcagttctaataactggctgagacttaatagtgacaatttatatgtattgtctgcctgtacggctgtcatctcatcctgtgctacacgtgcctgcgcttcagctacctccgccggtgaagccttgccgacatcatgcagtcctttgatacgtttcagctgatctttgcttaactcaacctgattttgtgctaccttgttcaattccagattgaaaagcacttgcagataggcagaggtaacattgattgcaatatcctctttggctttattcaggtcctcgatagcagcctgtaaattgagcttggcaagggaatattgattggataattgtaagcctgtgaagagaggtacattagtacttaagttcactcccgtactggaactgttagtatcactatatgaattatctttcggagaagctgtacgtccccagctccacccctggctgataccaccatttaagttcggcagacgtgcccatttagcggtgtttacactaatcttattttgttcggcttcattggctgtctggcggatgtcgatgttatgctcgatggcatagtcgatgcattgccgtaaagtccatgtctgcggagtggtatcctgtgcttgaacagaaccgataccggttccgctcaacaggatgattgccatcattttattgattactttcattggatgtcagttatttatcttttttctcagcaccgcgtaacttggtctgagcggttacacctttttttatctcaatcttgataccgtcactcattccggtagtcacctgtgtacgttcgaatttctgttgtggtacggagtccgtcatgatatacacaaatgtagagtcaccgctgaactcaatcgtactttcgggtactgccagcactttgctggcacgctggagcacaatctctgcattggcagaatagccggaacgaatctgcacggtatccggaactgtgatagcagctttgatttcaaattgattggctccgttggtttctactcctttcggtgaaatatattcgagaatagcatcaaaagtcagattctgtaaagctccgatcgtcagtttaatcggcattccctcatggatgcgacccacttcggtttcgtcaatatttcccctgaaaatcagatcgttcatgtttgctaccgtagcaatggtagtaccgtcgttgaatgtattactcatgattacggagttaccggctttcactggtacgtccagaattaatccgtcaatagtagagcggatcatggtgctactgaatgaagcactgtttttagtgattccttcttttataatttccagattatctttggcagtctgattctcttcccgtgcctgctttaccgctacttctcctttttcgtaatcttcacgactgataagctgatcttcatataacttcttgatacgggtaaagtctgtttcggcctgctttgcattgatctctgccaggcggacacgactttctgcggagttcagttgtccgagttcgggaattactttgactttcgcgatcacttcccctttttttacgctctgtcccgcttctttgaatacctcgtctacaataccggaaatctgaggcttgattaaaatttcatctctcggctctacctttccggtggctactgtagtcttttcaaggtccgtgacttctgctgccagtgtttcatatacgatcactttaggcttggatttctgataaagaaatacgaacgttccgacaaggattatggcaataattaccaataatgtgattttcagatactttttcatcttgaatatatatgtttaatttttaattcttcatttaactctcaactctcccttctcaactctccacttctactcatctctgatcgcttcaatcggtttgatagccattgcacggtaagcaggtgccagtcctgccaacatacctaatgcgatcagcagggcgcaggttccgactgctagtccgaagctgacctggaaatgagcatctcctccgtcggagttcgctcccatctcaaccagttgcagcaccatgacagcgaaagaaattccgaacatgccggcgatggttgtcaagaccatgctttcagataagatttgctgcaggatgtctttggggcgtgcaccgatggcacggcgtatgccgatttctgtagtgcgttctttcactgtcaccatcatgatattcgatacaccgatggcgcctgccagcaaggtacccaaacctaccatccagatcagaatatggataccggtgaataagttgtccaccatggaaaacattgcttcagcgttcagatacataagcgcctgcttgtcattaggggcaatgtagtgtgctgccttgatgattccttccatctggggttgtacatcggatacctttactcctcgtttgacggtgaagcagattacatcaatttgtccgcccaagttgtaagtctgctgcatagtggtgaatgggagggtaacagcctcggaggcacggccctgtatgttcatatctccttcggaagaagacatgccgatgacttgataatagatgccgtctacccgtacatatttgccacacgggtcttctcccggtttgaacaggctttcgtaaacacgcttgccaataacgcagaccttacgcgcttcacggatatctacgtcgttgataaaacgcccgtatgccatttcttgtgattcgatatggagatagtcgggatataatcctttcacactgcaatcgtatttcttgtctccataaatagcgttggatccccaacgggcaacggaaggggtgatgacttccacatcctttacctgcgagcggaggcgttcgatgtcgatggcttccagatcccaccagcgtcctttacgaaatcctttgtaggcttctcccgttttttgggcggcaaggaagccggagttggtggcaaatccctcaaagttcttttgcatcatatcctgcaatccctgtccgccgccgataagcgccacgagcatgaagattccccagaatacgccgaatgccgtcagcaggcttctcgttttatttcttgtgatggtgatgaggatttcctcacaagtatctatgtctattctcataatctttaatcggctctaagtgcttcgatcggtcggatgctgactgctttgcgggcagggaacaatccggctaatgttccggctattactaatgtgagtgtagcttggatggcgattcctatgtcgaccgttggattcaggaataccgtttcggaccatataccgttgtccatagtctggtttccgaaggcattgttcatccattcggtggctccgatgcctgcaaccatacctatatatccgaatatggtggtaatcgtgacgctctctacgataatcagccaaaggatagaaagcggtttggctccgagcgctttgcggatgccaaattctcgggtacgctctttaacggtaatcagcataatgttcgaaactccgacaattccgcttaataaggtgaaaatgccaatcacccaaatggcaatacgaagcatcgccgatccttgctgttgctgcagataattggtgaaacggttccatatccagatggcgctatgatcggtcgggtcaaaacgctggttggcgccgatcactttacggtagtgggcttcgaattcctcgttagactctattgtttccaaattcttggtggtcatgatgaggttattcagcttgtctcctttattataaatcgtttgcagggttgtgaacggaagataagcatcgctgtctccgctgtcacctttgtcattgtacagtcctactacctgatagacaacattgcccgcattcacgaattgtccgatggggtcagtatgtgttttgtcgaacaggatttcggcagtctttttgtggagtacaattactttccgtcgttctttaatgtcgatttcgttaatgaaacgtcccttgaaaagctttactacttccacttccgtatggttgggatatactccagaaagattcaggttgacatattccggtccgaagctaaggttcacacctccctgatatacggttgctccggccttgatgacatgatccggaaaattcttattggtcgtattcaagtctttgttatccagtcgtatccgccttccttccttcagaccgtcgtatgatttactggtccatcccggaaaaattttgatggagttcatggcccgttccgaagccgactgttcgaatgcgtgaatcagcccgttgccggcacccagcaggacgatgagcataaatattccccatgcgacggcaaatccggtgagaaaagtcctcaacttattgcgtttgatggtactatatatttcttgccaaatatcaatcatattttaagtaataagttataagtaataggtaataagtattaggtattaagtataaagtattaggctgcgttgtgaccgcatggaattaatacttaatacttattacctattacttatttcataattccgttttggccgaatggagaggcgtcgtggtcgaggttctcttcaatccgttcgataataccatctttgatatggatgatcttgtccgtttggttggcaacaccgctttcgtgggttacgacgacgatggtcattcccattcgatgcaagtctttcaatatctgcattacttctacggaagttttgctgtccagagcgcctgtcggttcgtcggcaaggatgatctgcggctgggtgattaatgcgcgggcgatggctacacgttgtttctgaccgccactcatctcatttggcatgtggtgtgcccactcctttagtcccagccggtcgagatattctagagcgagtgcatttcgctttttgcggcttacaccttgataaaataagggaagtgccacgttttctacggcatccttgaatgatatcaggttgaatgactggaaaataaatccgatcatacggtttcgatactcggcagctttcgtttcgctcaagtccttgataagtacgttgttcagataataatccccggtatcgtagttatcgagtattcctaatatgtttagtaaagtagatttgcccgaacccgaagctcccatgatggaaacaaactcacctcgctggatgtcgagattgatgcccttgagtacatggagaggtgctccgttgttgtaggtcttgttaatgtctgttagttttatcacaatttcccttattaagtttcttttttctttttatttttcactattagacgcatgaaagatacgaaaagttgcaaacagagtgaacttttttgaaaaaacattttgtagactcaatcttctttacgtaatttgtgtgcagtaaactttataattaactaacccttttaaataaagtatcatgaattcaaacatggagaaaccctacgtagtaggtattgacataggcggaacaaacaccgtctttgggattgtagacgcacgcggaactattattgccagtagctcgattaaaacagccggctatccgactgctgcagaatatgctgacgaagtatgcaaaaacttgcttccgttgatcattgctaatggtggtgtagataagatcagaggtatcggtgtcggtgctcctaatggtaactattataccggaactattgaatttgctccgaacttgccttggaaaggaattcttccgttggctgctatgtttgaagaaagactgggtattcctactgctttgaccaatgatgctaatgctgctgctatcggtgaaatgacttacggcgctgcccgtggtatgaaagattttattatgatcactctgggtacaggtgtaggtagcggtatcgttatcaacggtcagatggtttatggtcatgacggttttgccggagaattgggccacgtaattgcacgtcgtgacggtcgtgtttgtggttgtggtcgtaaaggctgtctggaaacttactgttcggctaccggtgtagctcgtactgctcgtgaattcctggctgctcgtactgatgcaagcttgcttcgtaatattcctgctgaaaacatcacttcaaaagatgtatatgatgcagctgtacaaggtgataaactggcacaggaaatcttcgaatttacaggtaatattttaggtgaggctttggcagacgctattgcattctccagccctgaagcaattgtattgttcggtggtttggctaagtcgggtgattatattatgaagccgattcagaaagcaatcgatgacaatatcctgaatatctacaaaggcaagactaaattgcttgtttccgaactgaaagattctgatgctgctgtactgggtgccagtgctttggcttgggaattgaaagatctgaaagaataatatcatttttttaataataaaggtaattggatccccgggggcgttgagtttccggggatttttggttttacaggcatgctgaaaaataacaaagaatcttatacccctaatacaatattgacatcgatattcaattttctgctaatttcacgagctacttttaaggttggttcgcttctgccagtaaaataatcactgatacgggaaggactgactccaagcaattctgataatttagcctgactgagtcccatttcatacatacgaagtttcatgatatcaaccaaagaaggagtttttattggataatactcatccttgtattcctctacaagtgctgacaataaatctagttcaataagatttttgtcagataaaggagtgtcatcatcaactaatggaagaagttcttctattctttccattgcagctttataagcagtctcattctgaatctttgccatatctatacgtttttaacatctcaattattttacttttggctatactctcatgattgcactcttttattcaaaaaaaaatattatgtattgaaaaacaaaacaatgtactatttttcaatatataaagtggggaggtaggtggtgataggtacttatatggaaaaacgaatcttttcttcgaaatagactttagaacattttatgcgtctatggttgctaaaaaaacattaattcctggtccgctctatgaataaccgataaattttgcatctatggttctctttgtacttgtatatatcgtgttttgctatttatttgatctgtttgtcccctttttaatagtgtgttgtttgggaatattatttctaggtaacaaaatgatatttgttggatgttgggaacaggagttgaaatagaattcaaatcgtctgaaagtagatgagtttgtgatattcggcgggtaaaatgaacttggttttaaagaaagattccgttggtttaaaaccaacgcctcgttcctttaaaaccaaaaactctttttaatcctttaaaacttgcataatccatggattttatgcagaaaagcagttgcgtattgcatatttataagtcattttgtgcaataattcgtctggaacacaggtttctctctgctttttaataatagaaatcttaaagatgggacattgaattccactttcactattgttgtcaatcgaacaatagagatttttgcgatggtgacactatcctgatcgcatagtgtcagtatcccgtaggtatagtgacactataccggcaggatggtgtcactatgttcaaatgctcgctatgacaaaagtatggaagagagatggcttgaaataaaaaagaggaaatcccgttgccggaacttcctcttttttatttcgaatctcagagttcagcttagttgttaactcttttttctttgattctagctttcttaccagtaagagcgcgcaggtaatacaatttagcgcgacgaactttacctaccttgttcacttcgatgctatcgatagccggtgattcgattgggaaaattctttctacacctacagtacctgacattttacgtacagtaaaacgtttcttgtctccgtgaccggcgattttgataacaacaccacggtacaactgtacacgttctttgttaccctcgatgatacgatatgctactgttacagtgtctcctgctttgaagctcgggtgctgtttaccggtagcaaatgcttcttctgcaattttaattaaatccattgttgttattattaaattgttttatcgttacaacgcaacataccaagtatctcttctcttgacagcgattgcgcgaaagcggtgcaaagtaacgaattatttatcagatagccaaatgttttggagaaaatgatcggctgtgagctggtatcgaatgtttttgggggtacatcaaacaaatgtggcaatagatttgtatctttatgattgggaataggaaaaaaggcactgccggggaatgtggagaagggttcacttctcttttgcagcagcctttattgatcattttaaacagtaaaaaatggggaatttaatttcatttatgaagaaggtagccgacgggctacgggaaagtgggaattatgggaccgcccatatttacaggagtagcatgagtgcaatccttgcattcaatgaaagcgggaatctgcctttccgaaaagtgactccggagtttttgaaaagttttgaagcgtatctgcgtggaagaaattgtagctggaatacggtttctacttatatgcgtacgctgagagctgtgtacaatcgagcagtagaccgacgcattgcaccttatgtaccgcatcatttccggtatgtctatacggggacacgtgctgataaaaagcgtgcattggaaaaagaggatatggaacgtcttatgaaagatcttccgaaacagctgcactcgggaaacagggaattgcagcgtgctcgtggttttttcatattaatgtttttgctgcgtggtatgcctttcgtcgatcttgcttatctgaaaaaacatgatatagacggaaatgtccttacttatcgtcggaggaaaacaggcagaatgctgactgtgactcttttgccggaagcggtgaaattgatcaaacagcatatgaataccgatcctgcttctccttatctcttttcgttgatttccagcaaggaaggaacggaggaggcatataaggaataccagttggcattgcgcaactttaattatcagctgatgattctgaaacaagtgctgggactgactacggatctgagttcatatacagcgcgtcacacatgggctacgatggcttattattgtgaggtgcaccccggtgtcatttcagaagcgatgggacattcatctatcactgtcacagagacttatctgaaacctttcaagaataagaaaattgatgaagcgaatgtaatggtcttctcttcctttaggaagtctttctcggtaggtaattgtttgaattaaagcctgttactttgtaggtaacgggaagaaaagacgctgcaaatatgggtatattttggaaaacatgcaaacaaaaatgatattttttctgataaactactaaaaaaaggaaacacacagaataaaactgcggattttttgagaagaacacggcttggtctttaatttttgcaaaagatttccctcccctctgccatcgtctgagagcaggggttaaaaatattctttacttattcaatgaatgtagtccgcagacgcctctgtcggggtggaaaagtacgctttcccgttacctacaaagtaacgggcgaatattatttgaacttagtgtttaataatatattattaatgtaatttttaagtagttatgaagaaaaaatttattagagtgatgtttttcggagcattggcgctaaccacattttcatatgtaggttgtaaggactacgatgacgatatcgatcggttagagcagaagataaccgaaaatgccaacgctattgcggaaatcaacaagctgatcgaagggggatctgtgatcacaaaagttgagaacattaccggtggtgtggaagtaacattgagcaacggtaagagctttaccattaaaaatggtgatgccggaaaagatggtactcagtggacgattggtgaagacggatactggtatcaagatggtaagaaaacagagttcaaggctaaaggtgataaaggagaaccgggcactccgggcgagccgggaactccaggtactccgggtgaaccgggagaaccaggacagccgggtactccaggtaaagacggtgatacctatattccgggtgaagacggattctggtacaagaatgaagtgaagccggaaaacaagactgataagacttggattgtcccaggagttgtttctgttgctgatatgggtgactactatatcttcagtaatctgaagaatgaagctggtgaagcaacttctgctacagtttataaatactctgctacttttgtttcttctttagtacatgtaccttcaaatatcaataaggatttaggagatgttgtattcttgccagttattgcatatgataacaactcgaagaatacggctgtgtatgagtataatagtagtaatcaaccattatatcgtactttggttaatggatgggcggaatatgaatataaattgaatcctgctaatgtaaatcctcaatattatactggaatatcgtttgttgaacaaacagctacaacaactaccagagctactgaagttgggttacctttggctaaagtagtaactactacagaccgtggcaaattgatagtaaaggcctctgctggtgataacgccaataacccaaatgcgttcaaaatgtataaagatgattctgaacagggtactgcttatgataatccagatggcaaaccgatgaaagaatctactaaatacggtgaggctggtaaagtgaatatgcttgcctacatggttaagaatacgaatgaacaacttggtgagactgcaaatatcaatgtagtatctgattatgttgctacaaaacgtatggtggttgaacaagaggaaactactattggttttgctgttgatgcagataaatatgctgatcctacagtaaaagctccggctcttcctttgttgtctgatatgtacaagaaggcagaaactaaggtaaacgattatttagcaagtcttcctgttaatttgaaatttttgtatactgctgatcctttggatttggaaccattgctcacaggtttggcaacagaattccatactaacacaggctttgacgcagatgaaagtcaatatgtattgactgatcttggttttgaaaacgtaacattccaatatgaggcagtgagttatatggatgctgaagttgatcagacaaaacgttatctgaaattggatggtagcaaaatttctgtaatcgacaaacaatctgcttctatcgggcgccaggctgttttgaaagtaaagatgtatgtagatggcaaatttgttatgagtaagttgatgaagattgagtttgtagaacaagagcaacagactaaagactttgttaatacagatttgaaagaacagacgttggcttgtacagctttgtatggtggcggtgcgaagttggcagcagctactgcatatcagactgctactgttgtggaaggtcttaagatagacttcgaccaatactttaatgcattacaagtaagcaaagctaaattcgtagaatattatggtggaggtaatccgactgtggaagtaacgaaggatggcgttaaatttgatggctggagctttgattctgaagaagcaggtaagaatttgacaatcgattattctaacatcgaaggatctgctattactgacaataacaatgtatacttcggattgaagaaccagttgcgtgccggtacttatgtgattaagtttacttattctacaacgaatactgcacctacatacaaagcattcactattactgctacattggtagtgaaagatcctgtacatacatggacttataacccgtcaatgtgggaaggaacagagtatatgcttggttatggtcaaccgacttcaggagactatggcgcaccgttcttgatgaaagctactatcgaagatggattcatggattcatgggatggttgtggtcaatgggacttcgagttagtaactacagctcctgcaagcgagatgactcttacaacagatattgctactaataagcacgtactgaatatctttgataagaaatggatgggcaaaaagattcgtgtccgtgccgttgagtatattgaaacgaaagatgcagcgaaaaataatcgtaagatcaataacattgtatcagctactaagactagtgaatttgacatcatgttcgttaatcctgtagtttatgctcaggtaaatgcagcggcagcttggtatttggttgacaaagctaatactactgtcctgaaggaaggtgcttatctgcctatctaccgcttcgttaaattgtatgatataaagagaggtgaaacgaatggtatgatgtttgatggaagtcaagaagagccttggttcgaaagaaatgaggttgagattggtaaaggcctgttcaagatgcataaagtagaagtttcttataaactttcggataagaatgatgctattgtacagagacatgcttcaatacttaaatcgacagatggtaaagaagttggcttgctgaaatggaacaacgatgaaggtgtattggttggtgatgttgatcagccgattattatcgatgtaacgataaagaattcatggatgggtcaaccggaacagacaactacacaaacccaagaaatcactgtatacgttaagaaagcggatactaagtatactgtaccggctacaggattccttggaacattggctgctcctgaaggattaggctcatacgctgatttgaactaacattaacttgtaaatagttttagaagggtatcttcataagagagggtacccttctttaataaatatcttatttaaagaaaagagatgagcatgaataaaaagaaattgtggatagcagcgttttctttgctatttggcagtatagccgtctctgcacaagaacagagaattaaagaagaaggtaagacggaattcaaatcccattggtttatgcaggtacaagctggtgctgcgcataccgttggtgaggccaaattcactgatcttatatctcctgcagttgcattgaatgtcggttatcagtttgctcccgcatggagtgctcgtgtaggcgttagcggatggcaggctaaaggtagttgggttgctccacggcaggattataaatataaatatcttcaaggtaatgtggatatagtatctgatttgagtacgctgttttgtggtttcaatcccaagcgtgtattcaatggctatatatttgccggagcgggtcttaaccgtggcttcgacaatgacgaagctgttgcaattaacgcagccggttacccgatgggctatctttggacagaaggaaagtttcttgttgccgggcgcttaggtctgggatgcaacttgcgcttgaatgaccgtttggctatcaatatagaaggtaatgccaatgttctttccgacaagtttaattcgaagaaagcgggaaatgccgactggcagttcaatgctttggtgggtttgactattaaatttggcaaaggttataaagaaatcccgcctgtgtattacgaaccggaaccggtcgtggtggaacaaccgaaacctgctcctgtggtagagcagccacaacctagaaaagaggtagtagtacagctaatgaaacaggatatcttttttgccttgaactcggctaagatacaagacgaccaaaagtctaaaatcaatatgttggtagaatatttgcagaagaatccgtctgccaaggtaaaagtgactggctatgcggatgctaatacaggaaattctaagatcaataaaacactgtccgaaaaacgtgcagctaatgttgcagaagttctgaaaacaaaaggaataactcctgatagaatcattgccgattccaaaggtgatactgttcagccctacaaaacaccggaagaaaaccgggtgagtatctgtattgctgaataaatcatgttgctcaaccgatacgtaagtaacggatgcgactactttgcgggtatctgtctctgtgaagcgattgatagtcgtttttccccactaaggatttccccactatagtccttagtttattttagtgaagagaggaaaggtctgcacttgcgaaagaccggacttttcgctaactctattcaagggacgttcctaatttcccctttttccctgggaacgtccctttttattgcatatcattgatgataattcttccccatataaaacttaagatatatacaaaaatgtcacacgcccaatagcactttgggattttgaacaaatatatccctatctttgtcttttaagatttagggaaatagaaagaaaaggtgttatggaagaagcatgggaaagggaatcttcttcctcttaaaacagccttttaagtatcatttaaattcgtataataatggggaatttaatttcattcatgaaagacgtagccgatgggctgcgggaaagtgggaattatgggaccgcccatatttacaggagtagtatgagagccgtcatttcattccacggaagtgggaatcttccttttcggaaagtgaatcaggagtttctaaaaaaattcgaaacgtatttgcgtggaaaagattgtagctggaatacggtttccacctatatgcgcacattacgtgcagtgtataaccgagcggttgaccgacatcttgctccttatgtgcctcatcattttcgttatgtctatacagggacgagggctgacagaaaacgtgcactggacaaagaggatatggaacgattgatggcaaagctgccgaatcagctttattccggaatcagagacttacaacgtacacgtgccttctttttattaatgtttatgcttcgcggcattccattcgtagaccttgcttacttgaagaagcgtgatatagaagggaatgtcctgacttatcgccgaagaaagaccggcagaatgctgaccgtaactcttctgcccgaagcaatgaaactgatcaggcaatacatgaatactgatcctgcctctccttatcttttttcgctgatcgccagcaaggaaggaacagaagaagcgtatcgtgaatatcagctggcccttcgttattttaatagtcaactggtgattctgaaaggagtgttaggattgactgctgacttaagttcatatactgcccgtcatacatgggctacgatggcatattatagtgaagtgcatcccggtatcatttcagaagctatgggacattcatctatcacagtaacagagacttatctgaaaccttttaagaataagaaaattgatgaggctaatgcaacggttttctctccctttagaaaaacgtttttgaagataagttgctgataaatatggtgttacttcttaggtaacggcaagaaaacacgctgcaaatatggacatattttggaaaacatgcaaacaaaaaagatattatttctaataaacaattaaaaaaaggaaacacatcaaacaaaactgcggattttttgtgaagaacacaccttgctctctaatttttgcaaaagatttccctcccctctgccgtctctccaaagcaggggttaaaaatatcataacttatttattgaaaatggcccgcagacgcttctgtcggagtgggaaaatgtattatcccgttacctaagaagtaacgggcgagtattatttgaacttagtgtttaataatatattattaatgtaatttttaagtagttatgaagaaaaaatttgttagggtgatgcttttcggagcgttggcgcttgctaccggtgcatcgttcgtaggttgtaaagactacgatgatgacattgatgcggtaaatgccagagtcgatggaattgaaaaaactctctcggaattgcaagctcaagtgggaggctatgtgaagtctgtggtgtatgatgcatctacaggcaaattaacagtgactggtgcggatagtaaagagtacactataccaatgcctgaagaattgccatcgtatactcttgatgtgacaaaggatggtaagattactttgaagaaggatggtaaagaagttagttctggtactatcgacattcctgaaatccctgaaattccgacgtataaggaatttgatccattgttactgactgtaaaagatggctatgtttattatgatggcacaaaaacttctgttgcgattcctgagaccgcaaaaggatctattactgctatccttgatgaaaaaggagttgttacaggatatagaattgtaacgatcgaaaacggtaaagaagttactggtgaattctctgtcatagacgctatacctttgaagggattagtatttgagcccacttgctatgtgggtggaatctctgcattgaaagctaacaacttgacttataatgcatggtctcaaaatgcgtacgctaaaccgtcagaaaccggtgaaacatataagtctaatcctacactttcttatattactccgcaaatctgggcatattaccacatgaatccggctagcgtttcaatggcacagattgaaagcctgaaattcctttcaggcgataaggattattatccagtttctcgtgctgctgcaatggatccaactgctaatataaagaaatcagatgtcgtaaccgaagacggacaacgttatcttaaagttgcaatggatgcagatgcagaaaagataccggcactgaattctggtaaggtagctgtatatgctttgcaggctcagaccaaagctattggtgctgacgaagctaaagtaattacctctgattacgctagtatatataaggtacttatgagcgacttcgttctagaaaccaaaattgatgcagaagacgtaatcttatatggacaaagcatttctcgtactggttctactcctaatgctaatgcaggtaaggcacaagaagctattgatgcaaatgcagattacactgtagctacagatggtacacttaaattagcagataaaatctctacttattataaagaaaacaatggtactgaattagttaagatgactaatattaaagataacggtctgaaatatgtcttcactgcttccaattacattggtggagctaataatgagacagaacagaactcattctttaatggtagtgatgctgctaaaggtattattaaccctgaatataaaggtcaggattctgaagcaactgaacatcgcgagccattgttacgtgtagaattggtagataccactaaggttcctaatcaggtagttgctgtaggatggattaagacaaagattgttaagggtacaattgacggattcggtaaagtattcactaaagatacttattactatggttgtgagaacaatgttgccaaattgacttacctcaacatgaatgatgtttatgctgaagcgaagttgaacaagcctgacttccatacagcatatacattgaagaaagatgatggaggtgctatcgctttgggtgaaggaagtacaggaacagtaacagaagtaacggatcctgaagctattgctactacagtagtagagtggacagtaactccggcagaagctttggctcttgttaaaaagtcgaagacagagatgttcgctactgtgacttatgaatcagtagacggaactcgtggagatatcacaattacgatgaaagcaagcatcgcaatgcctagtggagtaattaagaatgaccagaagattactgaagcttggtcacctgataagtcttatgtaaaagctgatgtgaaagaaccggttactgtagcagtaacagacttcaaacttgatctgtttgatgtatttgaaggtcgtaaggttgttgtttctgacgttacagaagcgaacttcccatcatttacgaaggataagttgactgcgaagtttatcttctcaggagctaaggatgtaactatcggaactgataaatacacattcactgtaacagctaacggtactcaattgaatgctagcaagaatagtgctactgcaactaagattgctacaattgatgctgacggtattattacttacaataaggctgacgagaatgcacaagcattgttgaataagtctgcttacaacgtggatccgttcactgtaggtattgaaattgtggtaactaacgaatgcgatgaaatcttaccgttgactggtaacaaatttgatgtgaagttcttgcgtcctatcaatgtagttgacttgaagtctgccgaattgcaggatgcaactacaggaactgctaagatcgacatgagcaagttacttggtttgacagactggagaggtcaagcgtttgctgtagcgcctatcgatttctatacttattatggagttactggtagtgcaatttcaattgataaggatcagatcatgacaacattgaatgcaagcgaagctgcaccaaaactgttgaaggacgttgcacctaacatgtcaattaattacacatgtgatcttcagaaaataggtggtgacataacgtatggtgaccttgtttatgcaaacggtaagtttactataaatgcaccattcaaactgtttattcctgtaacggttaaatatacgttcggtgaagtaaccagcacagtaacattaacaattactccgactcaccagtaattgattgatctctcacgatagcaatatcgacaaagataagaagggtatctttttcaaaagaaggatacccttctttaataaagttaatgcagtatcatattaaaaagaaaagataagcatgaacataaagaaattgtggatgcctgtattcgccttactattaagtagtacagtcatttccgcacaagaacaaagaataaaagaagaaggtaaaactgaattcaaacctcattggtttatgcaagtgcaagtaggtgctgctcacacacttggcgaagctaagtttagtgatcttatatctcctgcagcagcgataaacgtaggttatcagtttgctcctgcatggcgggcacgtgttggtgtcagcggatggcaggcaaaaggaggctgggtttctccgcaacaggattaccagtacaaatatttgcaaggtaacattgacatcgtttctgatcttagcacattgttttgtggttttaatcccaaacgtgtattcaatggttatgtctttctcggaggaggattaaatcgtggctttgataacgatgaggcgaatgcactggatacacgaacctatgagatggaatatctttggcgggacggaaagtttctcattgccgggcgcatgggtttaggatgtaatctgcgtctgaatgatcgcttgtccatcaacatcgaaggtaatgcaaatgtcttgtccgacaagttcaactcaaagaaggcaggaaatgctgactggcagttcaatgctctcattggtttgaatattaaattcggtaaaggctatacggaaactaaacctgtatattatgaggcagaacctgtagtagtggaacaaccgaagcctgttcccgtggtagaacagccacagccgaagaaagaagttgtagtacagccaatgaaacaggatatcttctttgctttgaactcagcgaagatacaagacgatcaaaagtcaaaaatagatatgttggtagaatatctgcaaaacaatccggctgcaaaggttaaagtgacaggctatgccgatgtaaatacaggcaatcctaaaatcaacaagtcgttgtctgaaaaacgcgcaggcaatgttgcggatgctttgaaggcaaaaggaataaccactgacagaattatggttgattccaaaggagacactgttcagccatataaagcaccggaagaaaatcgtgtgagtatctgtatcgccgaataaacaaagttattaacaagatattataagaagatattctaaaaaatatgttgcttcatcggtacaaaagaatttctaatggtgtagaaatatcattgatggaataagtaccgaatgcgactactttgcgattatgcgctcctgtgaagaagctgatagtcgtttttccccactaaggatttccccactatagtccttagtttattttagtgaagagaggaaaggtctgcacttgcgaaagaccggacttttcgctaactctattcaaaggacgttcctaatttcccctttttccctgggaacgtcctttttttaattaaatcaaccctgcctcagaatacttttaattaacatttttaagtgcattttgcagctaattccccttgaaataggactaaacttgctataagtttcttcttcttccgcatgactttaaaatataaaatgtacatttgtagcataaacaaaagaaagaagatgaaacgaaattacgtaaagtatacttcgggagctattctgacaggactaatcctattcacttcctgccaatctacccgtgaagttcaggcaaattatgaagttgcccagatagaaggaacccggatttgtatggattcaacctgggatgctcatcccgacgaaaaggctgccgccctgcttaaaccctacaaagaaaaaatagataagatgatgtatgaggtgattggcgtcagcgagatgacgatggacaaaggacgtcctgagagcttgctttccaacctggtcgccgaagtgctacgactctctgcagagcgtgtactgaagcatcctgccgatattggaatcatgaatatgggcggtttgcgcaacatacttccacagggtaatatcacagtcgatgctgttttcgaaatacttccttttgaaaattctctctgcgtactgacgatgaaaggtacggaaataaaaagactgatggaagtcatagcttctttgcacggtgaaggactgagcggagcacatctggaaataacaaaagacggaaaacttctgaaagcaaccgtacaggaaaaagagatcgaagatgacaaagactataccgtagctaccattgactatctggcggacggaaacgacggactcactccctttatcaatgcggataagcgtgaatgtccggatggattgacattgcgcggactgttcctcgactacgtaaggcaacagacagctgcaggcaagaagattacctctaaactggatggacgtatcaccgttgttccggcatccgaccggaaataaaaaaatgaaaagagaataaataaccaaggtttacaatgaaatctcagtatcctatgacaactcataatcatataacttccgtcttgaatatattcaaaggaagaaccggaaagtggctgatgcttttcctccttttactacctgcattggcaactgcccaagaaacaaaaaaactaatcatactgcaaaccagtgatgtacacagccggattgaacctatgactcaggaaggcgaccggaactacggtcagggtggatttgtccgtcgggcaagtttcctgcagcagttccgcaaagaaaatccggatgtactgctgttcgattgcggcgatatctcgcaaggcactccttattataatatgtttaaaggtgaggtagaagtcaccctaatgaatgaaatgggatacgatgcaatgacaatcggtaaccacgagttcgatttcggtttggacaacatggctcgtctatttaaattagccaagtttccggtagtatgtgccaactatgatcttgatgccacagtactcaaagatatcgtaaaaccttatgtcattctggatcgtttcggcttgaagatcggagttttcgggttgggagcgaagccggaaggactgatacaggccaataaatgcgaaggggtaatctataaagacccgatcgccgtatccaatgacattgccgcacaactgaaagaagaaggatgcgatgtcattgtatgcctgtcacatctgggtattcagatggatgagaagctggtagccaacacccgtaatatcgatgttattctgggtgggcattctcatacctttatggaaagccccaagaattatctgaacatagacgggaaaaatgtccccgttatgcacaccggaaagaatggaatttatgttggacgactagatttgaccttgaataaaaaatgagattactaacatatatactggctatcctgctatttcttcctgtcaaggccaggggagaagcaatagatactcccgtagaacctttactactttataaagctaaacaagatgtccgttgtcaacaatgggtagactccattatgaataagctgacgcttaaagagaaagtcggtcagttgtttatatatacgattgctccggtagataccaagcgcaaccagatactgctgaaggatgccgtcgatacctataaagtcggcggactgctgttttccggtgggaagatgcagacccaggcggaactgactaatcgggcccagcgcatggcaaagttaccgttaatgatcacttttgacggagaatgggggctggcaatgcgtctgcgtggtactcctgtctttccccgaaatatggtgctcggatgtattcaggataataaattaatctatgaatatggtcgcgagatggcacgccaatgtgtacagctaggtgtacaagtcaactttgctccggtggcggatgtgaatatcaaccctaagaatccggtcatcaatacccgttccttcggtgaagaccccgtacgggtggcggataaggtagtagcttatgcttccggtctggaaggcggaggcgtactatccgtctgcaagcatttccccggacatggtgatacggatgtagactcgcacaaaacacttccggtacttcccttcactcgcgaacgtctggacagtgtagagctccatccttttaaagaagcgatccgtgccggattgagcggtatgatggtcggacacctgcaagtgccggttattgaaccgataggcggacttccttcttctttatcccgtaatatcgtttacgatctgctgacagaagaatttgctttcaaaggactgatcttcacggatgcacttgccatgaaaggtgtttcggggaatggaaatgtcagtctgcaggcactgaaggcagggaatgatatggtgctggctccccggaacctgaaggaggagatagccgccgtactcgatgccattgataagggagaattgacacgcgaagatattgaagagaaatgccgcaaagtactgacttataaatatgtgctcggactaaaaaagaaaccgtttgtccagctatccggtttgggacaacggatcaatactcctcagacacgtgatttaatccgccggttgaatctggctgcgattactgtgctgaataatgaaaatcatgttcttcctttgcatacgaatcaaaaagaaacgatggcattgcttgaagtcggtgatgcgggtgaaaccaatgcattggcggaacagttgtcgaaatacacttctttgtcacgtttccgtcttcgtcccggtatgacggaagaggcgaatcagcggttacgggactcattggctgcctataaacggattattgttgccgtaagtgaacagaagctgtcaccttatcagaccttcttcggtaaatttactactgaagctccggtcatctatgctttctttacgcagggtaagatgatgttgcagatacagcgtgcggttgcccgtgcctcggcagtggtgctgggacacagccctaatgaagatgtgcagcggcaggtggcggatgtgctctttgccaaagctacggcggatggaagattatcggccagtcttggagaactctttcaggcaggagacggtgtcacgattactccgaaaacacctttgcattttattccggaagaacatgggctttcttctgtcgccctgcaacgaattgattcgatcgctttggacggtgtacgtcagggagcttatcccggttgccaggtgatcgtgatgaaagagggtcatgtgatggtagacaagacattcggcactcacaccggaacgggaagcgcacgtgtgcagccgaccgatatctatgacttggcttcactctccaagactactggtacagtgcttgctttaatgaaactttacgataagggacgttttaatctgacggacagaattgcagactatctgcctttccttcagcatactaacaagaaagacataaccattcaggaactgctttaccatcagtccggcttgccgcccggaattgctttttatcgggaagccatcgatgaagatagttatgaaggcagactgttcatgtcccgcaaagatgcacggcatccgttgcagttgggaacttccacatgggcgaatcctaattttgcatttaaaaaggaatatgtttcaacggttaaaaccggagattacaccttgcaaatctgtgatagtctgtggctgaatccttctttcttcaaggaaatggagaagaagattgcagacgcaccgatgaaacctaaaacttaccgatacagcgatgtcggttttatcctgttgcgtcttttggttgagaaacttgcgggaatgccgatggatgcctacttgcaacgtgaattttatgaaccgatgggactggaacgtacaggataccttcctttgcgccgctttccgaaatcggaagttgtaccttcttctgtcgatcgcttcttgcgtaagactacccttcagggatttgtgcacgatgaggctgccgctttccagggaggcgtttcgggaaatgccggattgttctcgaatgcacgtgaagtggcacaggtttatcagatgttgctgaacggtggtgagttgaacggacagcgttatttaagcaaggaaacctgccagttgtttacaacggaagtttccaaaatcagccgtcgcggacttggatttgacaagccggatacccgtaatccggaaaagagcccttgcggaaagcatacaccggcaaaagtatacggtcataccggatttaccggaacgtgtgcctgggtagaccccgacaatggcttggtttatgtatttctgagcaaccggatttatccggacgtaaccaaccggaagctaagccgtctggaaattcgcgaacagatacaggatgcgatctataaagcgattcaaagcaaataaaaaatgaagagcccctctgccgaagtagaggggctcttgcttattaatgtaaaatcaagtagttgctcgggttagaatgaaacacccacgcggaaaccgaagttgttcagtccgtctacactgtaatgcagtacatcagccttattggtaccatagctgtagtacagagcaaagtgcagacccggtccgtaaacccaagggaatacattgacacctacttcaggagaagcgtagaatccccagctgttttctctggcttccaacatattgaagttggaacggatcttagcatattcagcacctaattttgcactgacataaggttgtacggctccaccgcgattccattggtagcgggcggcagcaccgaaaggcaactggaacattgtgtgttgctgatcagttgtaacgtcacctgcacctatcttgaatgtttcgcgaggaatatactcgtggttgctgtgatagttcaggaaaagacccagacccaggttaggagtaacgaaataaccaccttcaaagttcataccccaaccgctggctttgtctgcaaaattattgctcaatggaacattgaactgccagtctatattagcatatccattgtctgatagctgtgccttagccggcatggcaaaggcgatggcaatggctgctagcgccactaccttgaaatatatattctttcttgttttcataacagttgtaattgtttatttgttagtaagataaggtgactgagtgaatgactggttcactgcttcaatagcaagagtgcggttgatagctttagagcctgtttcaaatccagtcagatagcttgtccagactacaggaagttttttgccttcaccttcatctgctttcaggttcaccatttctgtaatgaatgagttggtgctatagctgtaggtcacagcgtacggatagtaccatccgccccagttaccccagtagctgggtccccagtagccgggatatccccaccaccattcaggttgtgtgtagccggtgaaataataagtacttgcgatgtagcttacttgaataccaagatcggcactttctttatcggcagccggttgataaccttttgcttccatattttctgtataagcagccagaatttgctcagcgccttctccttcgagatattccggttctttgctgtcagagataaccaagattttgtcagccagatagaatgtgctgaagtctttgaagttggcttgcttgtcgtagttagtgtataccagatagttgtcatccagcttacccatgtccgggtctttttcgcaagaagcgagtgcaaagaccgccaataaaataggaattaatttcttcatatcttttataatgtttaggttatataaaaatcacgccctggtaccttggggcttttgttacaaacaacaagaaatgtgtaaaaaggttcgtgcaaatgattatctttgcgagaaaattaacactcaaatgcttatgaaacacattcggatacctcttttcgtatggttctcaatcgtgctgctgatcgcagttgcgcccgtctcattgtcggcgcaggaatcgtttattcagaagatcgaaaaaaataagtccgtcagcggaataaagttgctcgacaccagccgcttcccggaaaagtatgtaatgtacctgactcagccgctggatcatcgacatcccgaaaagggaagtttccgccagcgggtgattgtgggacacgtcggttatgaccgtcccacagtgattgtcactgaaggatatggggcagggtatgctttgcgccccacttatcgggaagaactttctgaattgttcgatgccaatatgatctttgtggagcatcgctactttctcgaatccactcccgaaccgtgcgactggcaatacctgaccgcagagaattctgccgaggatttgcatgccgtgacaaccgctttcaagactttatatcctggcaaatggatcagtacggggatcagcaagggtgggcagacctccttattataccgtgttttcttccccgacgatgtggatgtttccgtgccttatgttgctcctctttgttatgcgcgtgaagacggtcggcacgaacctttcctccgccgggtaggtacggaagccgataggaaaaaaatagaagatttccagttggaagtattgaagcgaaaggctcgtttgttgccccgttttgaaaaaatgtgtactgaaaagaactatacattccgcgctcctctggaagaaatatacgatttctgtgtgctggaatactctttctctatctggcaatggggaacggatatccgtagtataccggaaacctcggcttctgacgatacactgctggatcatttgctggcaatcagcggaccttcttattttatagtagacagcccgactctttctttcttcgtgcaggctgcccgcgaattggggtattatggatacgatatcgctccttttaaaccttacctttctataaagaccagcaaggattatctgagaagactgatgttgccggaagatatgcggaagatgaaattcgataagacattgagcaataagattgtgcggttcttgaagaagaacgatccgaagatgatttttatctatggtcagaatgatccctggacagctgccggagtaacatggctgaagaataaaaagaatattcatgtttttgtagagccgggaggcagtcatcttgcacgcatcggtacaatgtccgaagatcagaagcagaaagtgatgtctcttcttagagggtggcttgaagaatgacgaaacgagaaacggtgaacaacctgtaatatatgaacaggcggttcaccgttttattcttctgcaagccgatattacatgtatcgggctgcttgatttaggaatctaccgattcgaatagcggtttcagtaattccggtatttccactttttcaagtgctaattgtcggactagttttttaccgctctgactgagatggaactgcatcagtctccggtcctcttctccgagtgttctgacaatcagttctttttcttccagaatccggagcatctttgaagcgtgcgagggtgtcagctccgttcgtttggacaggctcgtggccgtcatattattgggcgaggcttcttgcagggcacataatatcatcgcttcatttaatgatacctgatacactttttcaaatgcatcttcaaatcttgccattgctttgaatacatcgcgcattacacatattgtcttcatatgctacttgtttttttgtttgttctttttctatataaacaggttgatatttgcattatccgcccgttccatgtatgttgctactccgcctattgtcacttcgtccagaagttcttcctgtttcactcccatgacgtccatggacatttggcaggcgataaattccacaccgttctccagagcttgttggcgtaaggactccagagagtcgattcctttccggttcatgatgtatcgcatcatttttcctcctattcctcccatgctcattttagagagtttcagctttcgggaactggaagggagcatcatgccgaacatttttccaaagatatctttttcgacgttcggcttatgcagcttcttgataacgttcagtccccagaaggtgaaaaagatcgttaccttttgtccggtggcagctgcgccattagcgagcacaaaggtagctaaagctttgtctaaatcatcactgaacatgatgaaagtttttcctttgccttcacaggaggtaacaatattgcaggatttaggttcgcccttttcgatcactactacagattttcctcctgctgtttctttggaaatcaactgatttcctgtcgagttgcaccatgcggcagcatcacgcgggaatcccggatcggttgaggtaatttctacccggtcgccggaaaccagcgaatccattgtctttttcattttcagaatcggccccggacattgcagtccgcaagcgtctacacggattgtcttcactgcttcaactggtgaaactgtcttttgaggttgcgcatctgccggctgttgtatgtttgcgttcggttgtgcaggtacttcgttctcactttcttctctcaggatgatgggtgctgcggcagcgtggtatgttttcaatcctccggaaaggttgcgtaccttttcaaatccatgctgtaccagaatgcgataagcaaggtatcctctgaggccgacggcacagaatgtatagatcatcttgtctttcggcagttcatccagccggtcacgcagttcgtccagcggaatgttcactgcacccggcagtgtattgagcgagaattcgtcaggagtacgtacatccagcaggaaattgttttccatctcgatatccctcaactgtctccaatagacgggttgtactttcccagttatgatgttttcggctacgtatcctgcaacggctaccggatctttggcagaagagaacggaggggcgtaagcctgctccactttcatcagatcatagatcgtaccttcatgcttgatgacaagcgcgatttcgtcaatgcgtttgtctacaccgtcatagccgacgatctgtccgccgtacagtttacctgtcttcgggtcgaaagtgattttaatactcatcggcatggcatccgggtaatatcctgcgtgagaggacggatggatggtcgaagacatataattgatttctgcctgccgcaatcgtttgccgggtaatccggtagaagcaacagtcatgtcgaatacttttgcaatggaagttccgatggctccttcataagggatgtgtgctccctgaatgttgtctgcgacaattcgtccctgacgattggcgggaccagcaaggtaattgagccacggttttccggtgatcgggtggcggaattcgatagcgtcaccgatggcgtaaatcgattcgtccgacgtttgcaggtagtcgttgacggcgattcctccggcttcgccgatcttcagctctgcggcacgtgccagtgtcgtttccggacgtacgccgatggaaagtataacgatgtcggcagagatggactgtccgttcttgaagatgactttcaatccttttccgtctctttcgaaagaggctactgcctgctccagatacaggttcactcctttgtccatcaaatgctggtgtacaagggatgccatggagaagtcgatgggagccatcacttgatttcccatttccacaatagaaactttagctccttgtgcgtgcaggttctctgccatttccagcccgataaatccggctccgatgacaacagcctttcggggagcatgactgttgatatattctttgattcggtctgtgtcggctacattcctgagtgtgaagattccgttcaggtcgattcccggcaggggaggacgtacaggggaggctccggtcgatatcagtaatttgtcgtagctttcctcgtaagtgtctccgctactttgtcttaccgttactgtttttctcttccggtcgatgaagattacttcattttcagttcgtacgtctacacgaaagcgcgtagaaaatgcttcgggcgtctgtacaaacagtttttcccgttctttgatcacgcctccgatgtaatacggcagtccgcaattggcataagagatatactttcctttttctaaaaggatgatttcagctgcttcgtttgtgcgtctgatccgggcagcagtggtagctcctccggcaacgcctccaataataatgatcttcataagtttgttgcgtaaatagtttcctgtggaaataacaataaagtagggagaattgttctcggatcatagaaaaaagacttatatttgcgcaccctgtttgtctttcttcattttttataaattaattatgagtaaaattcttatcattgacgatgaggttcagattcgtagcctgttggctcgtatgctcggactggagggttatgaggtgtgtcaggcgggtgattgcaaggcagctatcaggcagttggaaattcaacagccggatgtggctttgtgtgatgtctttcttcccgatggaaacggggtcgatctggtgttgaacattaaaaagacagctccgaatgtggaagtcattcttcttaccgctcacggtaatatacccgacggagtgcaggcaatcaagaacggtgcatttgattatataaccaaaggggacgataataataagattatccctctgatcagtcgtgccgttgagaaggctaagatgaatgtccggttagagaaactggaaaagaaagtcagtcagctatattcttttgattccattctgggagaatcgaaagtgctgaaagaagctgttatgctggcacagaaggtttcggtgactgatgttccggtgttgttgaccggagaaacggggaccggaaaagaagtatttgcacaagccatacattataatagtaagcggagcaaacagagctttgttgccgtgaactgttcgtctttcagtaaggaactgctggagagtgaaatgttcgggcataaagccgggtccttcaccggagctttgaaggacaagaaaggactcttcgaagaagccaacaacggtacgatctttttggatgaaatcggagaaatggcttttgaactacaggccaaattgctgcgtattctcgaaacaggcgaatatataaagataggagatacgaaaccgacgcacgtgaatgttcgtattattgctgctaccaaccgcaatctgacagaggaaatcaaagcgggacgtttccgtgaagacctgttttatcgtctttcggtatttcaggtacatctgccggcacttcgcgaacgtaccggtgatatcagaattcttgccactgcctttgcaaagagcttttccgagaaactttcgtatacggtcaatgagatgactcctgcttttcttcatgcgttggaacagcaaccctggaaaggaaatatccgtgaattgcggaatgtgatagaacggagtctgattgtctgcgaaggcgggcatctggatgtgtgcgatcttccgttggagattcagaatactcattatgaatgttcggatgataatatcggtagttttgaactggctgctatggaacgaaggcatattgcccgcgtcctggaatatacgaaaggcaacaagacggaaactgcccgcttgctgaagatcggtcttaccactttgtacaggaagatagaggaatacaaaatataataatatgactatctgatttcttttttaggggtatatgagcgattaatcgttcatatactgatctgtaatgtgaaaaagaaatagaagatatgaatatttggaagactacactgttacttgttttattatttactggtatcaccgttcatgcacaaaaagtaaaaatttcattgaatagtgatggaaatctgacgatatggaaagtgaaagctcaggcagaaattgagcatccttctgatatgatgactacccgatatgacacgagggattgggtcaaagcaactgtgccgggaacggtgtttggttcgtatgtattagaaggactggagcctgatccgaattttgctgataatgcgtataaagtcgataaagcaaaatatgaccgtaacttctggtatcgtacagagtttaattcgccggaggtggaaaacggagaaagagtatggctaaattttgaaggggttaaccgtaaaggagaaatattctttaatgggacgcgtctcgggttgcttgatggatttatgcatcgggggaatttcgatataaccgatttgctgtcaaaaaacggtaagaatgtgcttgccgtccttgtgcattgggtaggcactccggttcccaattatgcaagtcctacttatatgtcatgtgccggctgggattggatgccttatgttcccggtcttctgactggtattactgacgacgtctatttgacaaaaaacggcgaagtgtctatcgtcgatccttggatacgttcgaaagttccttctaaaaacaaagcggttttaagcttgcagttggaactacggaatcatacagatatagagcagaaaggagtgttgaaaggtatcattcagccgggcaacattgaatttaccgaagatttggtaattgaggcaggcaaacagcggacttttcttctggatgatagcaagttcagtcaatttataattcagaatcctgctttgtggtggcctaatggttacggacagccaaatctttatacctgcgaactgacttatatggtgaatggtaaggcttctgataaacagaatattacatttggtattcgtgaatacggttccgagctggttgacggtgtgcttcatcttaaaataaatggtgaacctgtttatgtaaaaggaggaaactggggaatgagcgaatatatgttgcgttgtcggggtgaagaatatgatcttaaattgaaacttcacaatgagatgcattttaatatgatacgcaattggatcggttcggttacggatgatgagttttatgaagcttgcgataaatacggcattatggtgtgggacgacttctggttaaattcaaattcgaatcttccggatgatgtttttgctttcaatatgaatgcagtggaaaagatcaagcgtttgcgtaatcatgcttgtattgcagtgtggtgtggtgataatgaggggtatccgttacagcctcttaataagtggctggaggaagacgttagaacatacgatgggggtgatcgggcctatcatgccaattcccatagtgacggcctttccgggagtggaccttggactaattctcatcctaactggtattttaccaaagccccttatggatatggtgccaatataactaaaggatggggattccgtacagaaataggtacagctgtctttactactttcgatagctttaagaaatttatgcccgaaaaagattggtggccacgtaatgaaatgtgggacaagcatttctttggcaattcggcggggaacgccagtcccgacaaatatttctctaccgtagagttcaattatggtaaagcgaaaggtattgaagatttttgccggaaagctcaattagtgaatgttgaggtgaataaagcgatgtacgaaggctttcaacatcatatttgggaagatgcttccggcatattgacttggatggggcagtcggcttatccttcattggtatggcaaacctatgattattattatgacttgacgggggcttactggggaatcagaaaggcgtgtgaaccggttcatattcagtggagttatgctgataatagtgtaaaagtgatcaataccactttgaaagagcagaaaggacttacggctacaggtaaagtctataatctggatgggaaagaaatggggcgttatagccagtctgtagttttggatgccgccgctaataaggattcctattgtttccatctgaattttacaacagacaaccttgctttcggtaagaaagcggttgcttcctccatttcggcagatgccggagagccaagtgccgcgattgatgccagtgatggcagtcgttgggcgagtgaaccccgtgatgaagaatggatttatgttgatctgggtgaacctactgaaatagcctctgtcatattgaactgggaggctgctcatgcaaaagcttataaactgttgatttcggatgatgcaataaactggaaagaaatttatatcaatgaggactctaaaggcggtgtcgaagagattaagataaaacctgtttgtactcgttatgtgaaaatgcaagggttgaaacaggctactatgtggggatattcactttatgaatttgaattatatggtagaaaaaagaagccaacggatttgactcctgtgcatttcatcaagttggaactgaacgatgaaaacgggcaactgctttctgataacttttattggcgttccaataaaccgggagattataaagcattgaataatttgccgaaagccaaattgcgcacaacatcaagcttagtggatagtaatggtaagaaagtgattaaagcaaagatcgaaaatgtgggatcatcagtcgcttttgctgttcacgtacaggctattcgctcttctgatggtgagcgtatattacctgctttgatgaacgataattatttcacattgttgaaaggagagtctaaagatattgaaatagaatttgattcggatttgttgcctgatggtaattatagtttaagtgtgattccttataataaataatatcgggcggacatttctttaaatgaggtaaacacggttgtagcaacatcggttttatgacttggttttaccagtctttgtgtttgtctatgatttttcaaatgtagtcgtgattcatcataaactttaagaaaagtttattgatgaatccgctacattaaaatgcctcatagaattgtgaggatgccggcagtgacgggagtatattatgataatgccgcaatgcctgtccctatcaggtttgcgttattcatactttttatatccacttcaatatctttcaggccgaataattgaaggagttctctcagtttttccataacgagaatgttatagtttttatccttcctgttttcactccagaaaaggctgccttcggctaccaggcaaacctttcgtatatccttattataggatttcagtaacatgataagccccgtaagtgaggcggcaaccaattgtgcggatctgccataaatccattgtgctacctgtacatatacatccttgtagatgtccgggtaattcataatggaagtcagtttctgtgcgtcgaatttctcttcgaactcttccagcggaaaggctgttttcagtatgtctcctagatacataccggataccgctttctcaaaacgttgctttcccggattaccggaaatagcgtcaacggtatcatctaccgcagtcagaaagggcggatggaaattgcctgattccaaattgacaggaatcaatccatgtgcattgcatgactgatccagtttttcaattttatcggcagggataaaagttgccatattggttcctgtccctacgatgaggccgatatatgcatcataactattatctgtgagaccggcgaataaactggctatagtatcgtttactaccttgatgcctgtaaacttaattttgtttctttcattcagatagtcgagtaaaggttttccgataaattctccaaccatttctttaatatctactccttttgtccagcgtaacagtttggcgtctccacccggtacggactcggccggataagaaaaacaataaccgataggcatttcttcctcacgtttgattcctataatcatatcgacgagttctttgaataactcttcgcgggtatatccgacggacttcataattgacatatcttttttccaaccattgttcgggtgaacggctggtgtttccctgtcgaaatctacgattgccacccgataattggttcctcccaggtcaagtaccagtgactttcctttaatatgggttgtttttggagtaatgaaggtaggaatgcattgtatctctgcattttccgtttttaacccttcttctgttttatcccgaaatgagcatacaattgctttgagctgttcattatctaacttaaaaatgtttttttccatgacattgactttttatagtataaaatatccttgtctttgaataacaactgaaggtggattttgctcgggaatgcccaatctttatttgcctgtatctgataattatgtatttgttttttcaattaataaaaactatatttgtttgaaaaataatttgatacatgaaagagcggtctccagttaaaaagaatatactaaaattgattccttatatagaaattattgcaggagtcatttttctctgtttggagattcatgactatcgtactttgtattctatggccgaagctgatgcaatgtatgggggacttgctgatttttgtaagtacaaagagaatgtattttgtccggcatttttctggataattgttatactgacaggactcagttattggaaaaataaaaagatatattggattttaacgcaggcattggtgtttatggtcttttttagagctatgtttccgttttatgccatttttatagagttaaatccagtagtcttttatattcttccacttttgtactctacaatattctttgtggtagaaagaaagttgtttaaaatcaagcaaatagattctgttgatattacagttaaaacaaaaatcacggggatcggaataggtatcttatgtactatcatttatttcctgctctttttgaccgttttttgcttaatatgatagccgtctatatttatttttccacagtgatttgatagccgttttgctctcatgctctaacagttcgtctgtatgcctttattcatcgatgttttagcagttagagatccaatggtagcagagtgagagcaagtgtttgctctcactctgctgaatcgtattacgtatcttttattaaatgttatatcttgatatacagtatattatcttccgatgtgtcagcgcttaataattgctaaatcagtcattaataactgatcccccgtgtgtattattggctgataaattctttctttctctctttctttctgaaataacaggtcaattgcccccgcttctactgtcgatctaatcggaccatacggttgtttcactcattccctacgcttgaagcactgttttcaagcgtccgaaaccttgttttcacggctttgaaactttagtttcaagccgatggaactctagttccaagctggagaaacaaaagtttcaaacgggagaaactaaaaagctctatatagaccaaccaacagcccataagtaaccattgacaacaaggcagtgtgacagcaaaatttgccgtcacactgccatcacctactgttgtcacctcattaattattcatattcaatcaattacacccgacaacgtgacagatgacagcaaattatagttttttattttcatagagagcttggctgacacgtaagtaggggttgactgaaaagtcggtagtatctccattctcctccttctggaaggaggagtggtcgcagaccgaggtggtaggagaaataatgtttgttcctatttctttgtaaatgaaaggattatgtattcacctaccacctccccctacgggtactcctccttcgggaaggaggagatttaagatactattgactttttagtcagctccaatagaggtagaaccgactttttagtcagtccccataagaatgttaatccaattgttgcggatggcatagttttttctttttcaaactttgtccttccccctatttcctcttcatttccctggtgcatccacctgcgcccgccctccttacgcgcgtgtgaatataattatgtgcatgcctttcctctgttcctcctacatccaagaattttatgttctataacatccttatgattcaacactttagcgagtcttttcaaaaataattcaaaaaaagagtgatttaagtttggagtatatttgaaaagggactacttttgcacccgctttccaagagaagaaagccttgataaattgacttagtgtaaaagcaagggtctgcttaaccataagaacaaaaaaacttccgataaagtttggaagataatgtttaaagttcttatctttgcagtccgattcgcaaagaaaaggcgtttaatttttcttctttaccttctttccctttcgcaagagagcctgagaaacgatataaaaagaaaaacgaaaaaaaacttccgaaaacatttggtagttaaaataaaacctcttacctttgcacccgcttttaaaacgaaagtaagatgttctttgaaatattgataaacaatacaagtagtacaagaaaaaaatagaaccgtcaatacttgtcttatatgtagtaatatgtatgagtcataaggtattaatgaagtcaataaattgtacggcatcctgaacagagcaagaaccagcagcaatgctgattaacaatacttttacaatgaagagtttgatcctggctcaggatgaacgctagctacaggcttaacacatgcaagtcgaggggcagcatttcagtttgcttgcaaactggagatggcgaccggcgcacgggtgagtaacacgtatccaacctgccgataactcggggatagcctttcgaaagaaagattaatacccgatggcataattagaccgcatggtttgattattaaagaatttcggttatcgatggggatgcgttccattaggcagttggtgaggtaacggctcaccaaaccttcgatggataggggttctgagaggaaggtcccccacattggaactgagacacggtccaaactcctacgggaggcagcagtgaggaatattggtcaatgggcgcaggcctgaaccagccaagtagcgtgaaggatgactgccctatgggttgtaaacttcttttatatgggaataaagttttccacgtgtggaattttgtatgtaccatatgaataaggatcggctaactccgtgccagcagccgcggtaatacggaggatccgagcgttatccggatttattgggtttaaagggagcgtaggtggacagttaagtcagttgtgaaagtttgcggctcaaccgtaaaattgcagttgatactggctgtcttgagtacagtagaggtgggcggaattcgtggtgtagcggtgaaatgcttagatatcacgaagaactccgattgcgaaggcagctcactggactgcaactgacactgatgctcgaaagtgtgggtatcaaacaggattagataccctggtagtccacacagtaaacgatgaatactcgctgtttgcgatatacagtaagcggccaagcgaaagcattaagtattccacctggggagtacgccggcaacggtgaaactcaaaggaattgacgggggcccgcacaagcggaggaacatgtggtttaattcgatgatacgcgaggaaccttacccgggcttaaattgcatttgaatatattggaaacagtatagccgtaaggcaaatgtgaaggtgctgcatggttgtcgtcagctcgtgccgtgaggtgtcggcttaagtgccataacgagcgcaacccttatctttagttactaacaggtcatgctgaggactctagagagactgccgtcgtaagatgtgaggaaggtggggatgacgtcaaatcagcacggcccttacgtccggggctacacacgtgttacaatggggggtacagaaggcagctacctggtgacaggatgctaatcccaaaagcctctctcagttcggatcgaagtctgcaacccgacttcgtgaagctggattcgctagtaatcgcgcatcagccatggcgcggtgaatacgttcccgggccttgtacacaccgcccgtcaagccatgaaagccgggggtacctgaagtacgtaaccgcaaggagcgtcctagggtaaaactggtaattggggctaagtcgtaacaaggtagccgtaccggaaggtgcggctggaacacctcctttctggagcgatgtcgtaacaacgatttcataggttctattattgtactactggtacttgtttatttataacatatagatcaaccatctatagaagtatagatagagataaacaagagaaataaagaagccgagtctaacatcaggtagacaaggttgaactagtcctatagctcagttggttagagcgctacactgataatgtagaggtcggcagttcaactctgcctgggactactccgaacaaaaattgtcgttgccaatacattattgcgatgttcaattactcttgggggattagctcagctggctagagcatctgccttgcacgcagagggtcaacggttcgaatccgttattctccaccatctctgaaaacagagaaacgatctttgacatgatgtacaaaaagtaaaatttagtaaagagctaaaagtatatatcgaaccgtacgttttaagtaccgcgatattgagtacccgggtttaatacctgatacttgatacctgatacttaaaggtaagtttgaaagaaagtaagcaagggcgcatggcggatgccttggctctcggaggcgatgaaggacgtgataagctgcgataagctctgggtaggtgcaaataacctttgatccagagatttccgaatgggacaacccggcattctgaaggaatgtcatccatctttgatggaagctaacgcagggaactgaaacatcttagtacctgtaggaaaagaaaataataatgattcccctagtagtggcgagcgaacggggaatagcccaaaccacccatgttacggcatgtgtggggttgtaggaccacgatgtcgcaagacatttgacgagtagaatcctctggaaagtggaaccatagacggtgatagtccggtatacgaagtcaaattaagcgtagtggtatcctgagtagcgcgggacacgagaaatcttgcgtgaatctgccgggaccatccggtaaggctaaatactcccgagagaccgatagcgaaccagtactgtgaaggaaaggtgaaaagcacttcgaatagaagagtgaaatagtccctgaaaccgtgcgcctacaagcggtcggagctgcgtaagcagtgacggcgtgccttttgcataatgaacctacgagttactttttccggcaaggttaagcatcttgagatgcgcagccgaagcgaaagcgagtctgaacagggcgtcgagtcggaaggagtagacgcgaaaccaagtgatctacccttggtcaggttgaaggttaggtaacactaactggaggaccgaaccgataagcgttgaaaagcttccggatgaactgagggtgggggtgaaaggctaatcaaacttggagatagctcgtactccccgaaatgcatttaggtgcagccttgtgagttactaatgtgaggtagagcgactgataagatgcgagggcttcaccgcctatcaagtcttgataaactccgaatgcgcattagttctatcacaggagtgagggcatgggtgctaaggtccatgtcctaaaggagaagaatccagaccatcagctaaggtccccaaataaacactaagttgaactaacgaagtcagattgctaagacagctaggatgttggcttggaagcagccattcatttaaagagtgcgtaacagctcactagtcgaggagtttggcgtggataataatcgggcattaagtgttttaccgaagctatgggatcagtaatgatcggtaggggagcattccactctgcgtcgaaggtgaagcgtgagctttgctggagcgtgtggaaaagcaaatgtaggtataagtaacgataaagggggtgagaaaccccctcgccgaaagactaaggtttcctgatcaacgctaatcggatcagggttagtcgggtcctaaggctcagccgaacggtgaggccgatggcagaacaggttaatattcctgtactaccttaaggagtgacgtggagacggaggcgtgacagcgccgcggactgacggaatagtccgttgaagggtgtagatgctgattatcccaggcaaatccgggataagagtcgaacctgatagtatggagcgttcttcggaacaatccaatagtgcgtgtaatcatactcccaagaaaatccgctaaacttaatccttgaggtacccgtaccgcaaacggacacacgtagtcgggttgaatatactaaggcgcttgagtgattcacggttaaggaactaggcaaattgaccctgtaacttcgggataaagggtcccaacgagagttgggcgcagagaataggtccaggcaactgtttaacaaaaacacagggctgtgccaaattgaaagattacgtatacagcctgacacctgcccggtgctggaaggttaagaggagatgtcatcgcaagagaagcattgaattgaagccccagtaaacggcggccgtaactataacggtcctaaggtagcgaaattccttgtcgggtaagttccgacctgcacgaatggtgtaatgatctggacactgtctcaaccgtgagctcagtgaaattgtagtatcggtgaagatgccgattacccgcgatgggacgaaaagaccccgtgaacctttactatagcttaacattgaatttgggtaattgatgtgtaggataggccggagacttcgaagcaggtacgccagtatttgtggagtcgctgttgaaatacggccctttgattatttgagttctaactcgtggtacgaggacactgtttggtgggtagtttgactggggtggtcgcctccaaaatagtaacggaggcttctaaaggtgccctcaggacgattggtaaccgtccgcagagtgtaatggcataagggcgcttgactgggagacttacaagtcgatcaggtaggaaactagagcatagtgatccggtgtttccgtatggaagggacatcgctcaaaggataaaaggtactccggggataacaggctgatccctcccaagagctcatatcgacggaggggtttggcacctcgatgtcggctcgtcacatcctggggctggagaaggtcccaagggttgggctgttcgcccattaaagtggcacgcgagctgggttcagaacgtcgtgagacagttcggtctctatctatcgtgggcgtatgaaatttgcgtggctctgacactagtacgagaggaccgtgttggactgaccgctggtttaccagttgtgccgccaggtgcattgctgggtatctaagtcgggattggataagtgctgaaagcatctaagtacgaagccagccacaagattagatttcttagggtcgttaaagacgatgacgttgataggatgcaggtgtaaaggtggtaacatcaaagccgagcattactaattgcccgttcactttctttcggacggtgcggatcgcgatatatacgtttagcttttttaattgacaattgacaaatgacaaatgacaattgacaattagattaacagatacttgaattttactttttatcatgtcataacttatcatgacagctgcgataattgtcatttgtcaattgtccattgtcaattgaagaaattcaggtggttatagcacgagggttccacctcttcccattccgaacagagaagttaagcctcgtcacgccgatggtactgcgtaacagtgggagagtaggtagccgccatttttagagaagcccttccggtagaaataccagaagggctttattgttttggatactttcggaatttaagtacacatcatccacatacttcaaatctcctgttctgctaaaaaataaacgaccggacaatcttttaataatactatttttcagtatccttttcagcctctttttccttcaatttcattctttttccttctgttttatttaaaatcccatattctgtcaagactaaataccctttcaaaattgaactactttttcaaaatggaaaggtcggctctgttattatatatttccttcttctttatatatgtttgataatcaatttattgtcatttcttttagagttttggcacgcatttggcataatacattgcaagtattataataataaatatttaaaagattaaagacatggagataacactatcatttgttttttgcctcttgagcggctttgcctgcttctggctattttggaaatgcgtagactggtttgaaaagatctagaagaggaaaggagaattaattatgtacacaacactatttgtattaggtattgcaatcttcggttatttgatgtatgtactcatcagacccgaaaagttttaaagttatacagtttaaggtaaaagtatgaatacagaaattttaggtgtggtcgcacaagttgccttgatggtgattttggcttatccactaggaagatacattgccaaggtttataaaggagagaaaacctggtcggatttcatggctcctattgaaagagtcatttataaagtatgcggaattgaccctaaagaagaaatgaactggaaacagtttctgaaagcattattgatattgaatgctttttggttcgtatggggaatggtattgctggtttcgcaaggatggttacctttaaatccggatggcaacggaccccaaacgccggatcaggcttttaatacctgtatcagttttatggtcaactgtaacttgcagcactatagtggcgaaagcggattgacttacttcacacagctgtttgtcattatgctcttccagtttattaccgctgcaaccggtatggctgctatggctggtattatgaagagtatggctgccaagacaacaaaaacaatcggtaacttctggcattttttggtagtgagctgtacacgtatcctgttaccgctttctttgattgtaggtttcatcctgattcttcagggaaccccgatgggattcgacggaaaaatgaaggtaactaccctcgaaggacaggaacagatggtttcgcaaggacctgcggctgccattgtgcccattaaacaattaggaacgaatggaggcggttactttggtgtgaactcttctcatccgttggaaaatccgacttatcttaccaatatggtggagtgctggtctatcttgattattccgatggcaatggtacttgcattagggttttatactcgtagaaagaaactggcttatagtattttcggagtgatgctctttgctttcctggtaggcgtctgtatcaatgtcagtcaggaaatgggtggaaatccccgtatcgatgaactgggaattgcgcaggataacggtgcgatggaaggtaaggaagttcgtttgggtgccggagctacagcactttggagtattgtgactactgttacttccaatggttcggtgaatggtatgcatgattctactatgccgttgtcaggtatgatggagatgctgaatatgcagattaatacttggttcggcggtgtaggcgtaggttggatgaattattatacgttcattattatcgcggtatttatcagcggtttgatggtaggtcgtaccccggaatttctcggaaagaaagtagaagcccgtgaaatgaaaatagctacgatagtagcactgcttcatccatttgtcatattagtgttcacagcaatctcaagttatatatatgtacatcatcctgactttgtggaaagcgagggcggttggctgaacaatcttggattccacggcttgagtgagcagctttatgagtatacatcttgtgccgctaacaatggttccggctttgaaggactgggagataatacttatttctggaactggacctgtggcattgtacttattcttagccgattcctgcctattatcggacaagttgccattgccggcctgctggctcagaagaagttcattcccgagagtgccggaacgctgaagactgatacgctgactttcggaataatgacgtttgtcgttatcttcattgtggctgctctgtccttcttcccggtacacgctttgagtacaattgccgaacatttaagtttgtaattctgaattagagaagatatgaaaaatatgaaatcagcttctttgtttcaaaaggagcaagttatagaaagcctgaaacaatcattcgtgaaactaaacccgcgactgatgataaagaacccgatcatgtatacggtagaggtggctacagtggtcatgttgtttgtgacactttactccatcatcaatccctctcagggttcgtttgcctacaacatagctgtgtttatcattctgtttattacactgctgtttgccaattttgccgaagcgattgccgaagcacggggaaaagcgcaagccgacagcctgcgtaaaacacgggaagagacacctgccaaaaaggtggaaggtaatcaaatagtgactgtaagttcttcacaactaaagaaaggagatgtgtttgtctgtgaagccggagacgtgattccgtccgatggggaaataatcgaaggattggcctctatcgatgaaagtgcgattacaggtgagtctgctccggtgatccgggaggcgggcggcgataaaagctcagtgacgggaggtacgaaagtattgtccgatcatataaaagtaatggtgaccacccaaccgggagaaagttttctggataaaatgattgcactggtggaaggtgcgtctcgtcagaaaactccgaatgagatagcactgactattctgctggctggttttacacttgtctttgtcattgtgtgtgtgacgttaaaaccgtttgccgattacagcaatactgtcattaccattgcttcacttatttctttgtttgtgtgtctgattccgacaacaatcggaggacttctttccgctatcggtattgccggtatggaccgtgcactacgtgcgaatgtgataacaaaatcgggtaaggcagtggaaactgccggcgatattgataccttgttgctggataagaccggaactatcaccatcggtaatcgtaaagctacccattttcacactgcgccgggcattgatctgcacgcttttgtagaaaactgtctgctttcttctctgtccgatgaaactccggaaggcaaatcaatcgtagaactgggacgtgaatcaggtatccgtatgcgcagcttgaatacgacaggcgcacgaatgattaagtttacagccgaaaccaaatgctcgggtgtcgatttgccggacggaactcagattcgtaaaggggcttttgatgctatccgtaagattgtggaaactgccggaaacaaattccccgaagaagtggaaaaggtgatcgctgctatttcaagtaatggtggtacgccgttggtggtatgtgttaatcggaaagtgacgggtgttatcgaattgcaggatatcatcaagccgggtattcaggaacgtttcgaacgcttgcgcaaaatgggagtgaagacagtgatggtgaccggtgataacccgctgactgccaaatatattgcagaaaaggcaggtgtcgatgattttattgccgaagcgaagccggaagataaaatggaatatatcaagaaggaacaacagtccggcaaactggtggcaatgatgggggacggtacgaatgatgctcccgctttggctcaggcgaatgtcggagtggcaatgaatagtggtacgcaggctgcaaaggaggccggcaatatggtagatctggataatgatcctaccaaactgatcgagattgtggaaatcggtaagcagttgctgatgacccgtggaacactgactactttctctatcgccaacgatgtggctaagtattttgccattgtgcccgctttgtttatggtggctatccccgaactggcggcgttgaatatcatgcagttgcatagtcctgagagtgcgatcctttcggcagtcatcttcaatgcgattattattccgatcctgattccgttggctttgcgtggcgttcagtacaagccgataggtgcaagtgctttgcttcgccggaatctgctgatttacggtgtaggtggtgtgattgctccgtttatcggaattaaactgattgatttattagtaggtttattcttttaattaaaaaacaatagcgatgaaaactttatttaaatcactaaagataactcttgttttctgtgtctttttctccgtattctatattcttattttgtggttgtttgcacaagtggcaggacctaataagggaaatgctgaagttgccacactggatggaaaagtggtgggtacggccaatgtcggtcagatgtttacaaaagatatttatttctggggacgtccttcgtgtgccggagacggttatgatgcttctagttcgtccggtagcaacaaaggacccacgaatcccgaatatctggctgaagtggaagcgcgtatcgatacgttccttgtacatcatccttatctgagccgtaaagatgttccggcggagatggtaacggcgagtgcctccggtctcgaccctaatattactccacaatgtgcatatgtgcaggtaaagagagtggcacaggcacgtggactgactgaaaatcaagtgaaagaaatcgttgatcaaagtgtggagaagcctttactcggacttttcggaacggagaaaataaatgtgctgaagctgaatatagcacttgaagagaataaataaccaaacactgggcggcgtgcctgtccgaatcgttttagttatttattgcggttcaaataaacagggctggacagggcgctgctcttttttagaaacataaaataaaaagataaatatgaagagtttttttagtaagaagattgttgtaggagcatgggttgcggcaactgtatgcgtatcgggtataacggatgcaaaagcacaggaatttactgtgcagggagatattgtcagttcctatgtctggcggggaatgtaccagggtggaggtgcggcttttcaacccacgctggggtttggggtcgataatttttctgttaccgcatggggatctactaatttcagtggagggaataaagaactggatctgactcttgcctataagtttggtgaggcaggacctacgctgacggttgccgatttgtggtgggaaggtgaaggggcatataaatattttaattttaagagccacgagacgggacatcattttgaggcgggattggcttatacgttgcccgtagagaagtttcccctgtccgtagcgtggtatacgatgtttgccggaaaagacaagaagctgaatgatagcggagaactgaagcagaattattcctcctatctggaactgaactatcctttcagcgtgaaaaatgtcgatttaaatgtaacttgcggcgcagtgccgtataaggcggagggtatgtacacgaatagtggcttcgccgtgactaatgtagctttaaaaggaatgacagagataaaaattaatgataagttttcattaccgatatttgcacaggctatatggaatccatgtgttgaagatgctttcttggtttttggcgtaactttaagaccatagatataaactcatgaatttttattatgcagaaacccgtggtgatcgtgatgattactacgggttgaaatagtttataaacagcaattaatgaaatggatatggatagagaacagaatgtacaacattttttggatctgatcaagaagtctcatcgaggcaaatttaaaatctatatcggcatgatagccggtgtagggaagtcttaccgtatgcttcaggaggctcatgaactgctggagaatggggtggacgtacaaatcggctatattgaaactcacggacgtgccggaacggaggctttgatgcagggactgcctatgatcccccgacgtaaaattttctataaaggaaaagagttggaggaaatggatgtggacgccattatccgccttcatcccgagattgtgattgtggacgaactggcacataccaatgtggaaggcagtttgaacgagaaacgttggcaggatgtgatgactctgttggatgaggggattaatgtaatttccgcaatcaatatccagcatatcgagagtgtgaatgaagaagtgcaggagattacagggatcgaggtgaaagaacgggtgccggacagtgtgcttcaggaagcggatgaagtggtgaatatcgacttgacagcggaagaactgatctcgcgtctgaaagcaggaaagatataccgtccggaaaagattcagacagcgctggataatttcttccggaccgagaatatccttcaactgcgagaactggctttgaaggaagtggcgctccgggtggagaagaaggtggaaaatgaggttgtgatgggtgtctcggtcggaatcaggcatgagaagttcatggcttgtatcagtagtcatgagaagactcccagaaggattatccggaaggcggcacgtctggcaacacgatataatacgactttcgttgctctctatgtgcagactccgagggagagtatggaccggattgatctggccagccagcgttatctgctgaatcattttaaactggtggcagaactgggcggagaggttatccaggtgcagtcgaaggatattctggggagtattgtcaaagtttgtcgggacaagcaaatatcttctgtctgcatgggaactcctaatctgagatttcctcatgccatttgctccatactcggatatcgaaagtttttgaataatttgtcacaagctaatgtagatttgattatacttgcataatattaaccgtatgaacgatatgaatattaaaacaaaactgattctcggcatcgggatgctggcgggaatgattattttgctggtaacactttctgttgtgaaccttcagttgctgactgccacagaacctgacagtcctgccgctatgccggcattggaacgcgctctgttgtggatttccgttaccggcggtatttgtatattgaccggattgacattgctgtattggttgccccgaacaatcagtaaacccatcaaggaactgaaacaagggattcttgaaatagccaatcataattatgaagaacggctggatatgagaaataatcaggagtttcgggaagtcgccgagagtttcaaccgtatggcggaacgtctggccgagtatcgggcaagtacgttagcggatattctttctgccaagaaattcattgaggccatcgtgaacagtatcgacgatccgataatcggtctgaatatggatcgtgagattttgtttattaatgaggaagcactgaacgtgctgaatctgaaaagaggtaatgtcatacgtaaatctgcggaagaattgtctttgaagaatgatctgcttcgccggctgattcgtgaactggtgacgccgggagatcagaaagagccgttaaagatatatgccgatgataaagagagttatttcaaggcttcctatattcctatcataaatacggatgcagggaaggatgaacccagcaaattaggggatgtcattctgctgaagaatataacggaattcaaggaactggattctgccaagactacatttatttcgaccatttcacacgaattgaaaactccgattgcggctatcatgatgagtctgcagctattggaagataaacgtgtcggtgagctgaatgatgaacaggaacagttgtccaaaagcatcaaggaaaatagcgaacgcctgttgagcattacgggcgaattgctgaatatgactcaggtagaggcaggcaagctgcaattaatgccgaagataacgaagcccattgaactgatagaatatgcgattaaagctaatcaggtacaagcggataagttcaatattcagatagaagtagagtacccggaagagaaaatcggcaagctctttgtcgatagtgaaaagatagcttgggtattgactaatttgctcagcaatgcgattcgttattctaaagaaaacgggcgtgtcgtgattggtgccaggcaggaaggagatatgatcgacctgtacgttcaggatttcggtaaaggcatcgatccccgttaccacaagagtattttcgaccgttacttccgtgttcccggaacaaaagttcagggcagcggactcggtttgtctatttcgagagactttgtggaagcgcatggcggtacgctgacagtagaaagtgaactgggaaaaggaagtcggtttgtgatgcgactgaaagcataaaagagaatgttcggaaagtgtccgaggcggttgctgtgataaataaatgtggtagctgatttaatttgaaatgaaactttgggaatcaagacattgcagcgtcttttaaaatctttatatttgcagactaattgaagttaaagtcaaatttatacaatataataacttaaaagaaccagaatcagatgaaacaggacatgattgttatccttgacttgggtagtcacgagaatacggtattggcgcgcgccatccgtgcattaggagtttatagtgagatttatcctcacgacatcacagtagaagaactgaaagcattgcccaacgtaaagggtattattatcaatggtggactgaacaacgtgatcgacggtgttgctattgacgtgaatccgtctatttatacgatggggattcctgttatggctgccggtcacgataaagcgacttgcgcagtgaagcttccggcatttacagatgatatcgaggctattaaggctgctataaagtctttcgtatttgatacttgtcaggctgaagctaactggaatatggcgaactttgtcaatgaccagatcgagctgatcagacgtcaggtgggtgataagaaagtattgctggcattgtcgggtggtgttgacagctcagtggtagctgctttacttttgaaggcaatcggtgaaaatttggtatgcgtgcacgtaaatcacggcttgatgcgtaaaggtgagtctgaagatgttgttgaagtattcagcaaccaattgaaagcaaatctggtttatgtagatgtaacagaccgcttcctggataaattggcaggtgtggaagatcccgaacagaaacgtaagattatcggtggtgagtttatccgtgtgttcgaagaagaagcacgtaaactggatggtatcgatttcttaggtcagggtactatttatccggatattgtagagagcggaacgaagactgccaagatggtgaaatctcatcataatgtaggcggtctgcctgaagatcttaagttccagcttgtagagcccttgcgccagttgttcaaggatgaagtgcgtgcttgtggtctggagttggggttgccttatgagatggtttaccgtcagccgttccccggtcctggtttaggtgtacgttgtctgggtgctatcacacgcgatcgtctggaagcagtacgtgagtctgacgccattttgcgtgaagaattccagattgccggcctggataaaaaggtatggcaatactttaccgtagtgcctgactttaaatctgttggtgtacgcgataatgcccgttctttcgattggccggtgattatccgcgctgtcaatacggtagatgctatgacagctactattgaaccggtagactggcctatcctgatgaaaatcacagaccgtattctgaaagaagtgaagaatgtgaatcgtgtttgctatgatatgtcgccgaaacctaatgcgactattgaatgggaataagagtatagagcattaaatagaatagcccccggaagctgaatataaactttcgggggctaattttttgcatttagcgtcacctatggcgtcacctgccaccaattgatgtataaaagaaaaaggcacccaagagtggaagcctctcaaatgccttattcttatcaagtagcgggacccgggattgaaccggggacctcatgattatgaatcatgcgctctaaccagctgagctatcccgccatcatttctcgattgcgggtgcaaagatagatgtttttctgtaatctccaaaacaattcataacttttttgtgttttttctttagaacgaggttctctttttcctataaatagggagtttggggccttgaaaagaaataagttttaaataaagtgtctgatttatgccacataattagaaaaaagtatttatcttggcacacgtaaaaacaattcgaaattgctatgaaaaaagaaaaaattcatttggagtatttgttgaacgcaacatctaaaaatattctttgggcagctattagcacaccgaccgggctggaggactggtttgctgataaagtagtatctgatgataaaatcgtagaattccattgggggaagactgaacaaagaaatgccgagattattgcgatccgttctttctcatttattcgctttcgttggcaggatgacgaaaatgaacgcgattactttgaaatcaaaatgacttataatgagctgacaagtgactatgtattagaaattacagacttcgcagaggcggacgaagttgctgacatgaaagaattgtgggagtcgcaagtggcgaaattgagaagaacgtgtggtttttagttaactttcaactaaaaattttctatgctactttttttgtgctaattttgcgtcttaattgcacgaacctattaagatgctacgcataaagaaattagatatatttatcgtaaagagcttcctgatgctctttataggtacattcttcatctgtctcttcatcttcatgatgcagtttttgtggagatatgtagacgagttagtcggaaagggattggatatgagtgtgatagctcagttcttcttttattccgcattgacactggttccaatatcgttgccgttggcaatattgatggcttctttaataaccttcggcaactttggcgaacgttacgagttgctcgcaatgaaagctgcgggtatatccttgcttaaaattatgcgcccgctggctttctttgtctgtggtttggttgctgtctctttttatttccagaatgtcgtggggcctattgctcagacgaaactatacacactgattatttcgatgaaacaaaagtctccggaattggatatcccggagggggtgttttattcggaaataccggattataacctgaagatagccaagaagaaccggaagacaggtatgatgtatgatgtgctgatttataatctgaaagatggatttgagaacgcacatattatttatgcagattccggacggatggaaatgactgcagacaagcagcatctctggctgcatttgtacagtggtgatttatttgaaaacctgagatcacagagtatgaaatctcagaatgtaccgtatcgtcgggaagaattccgggaaaaacatacgattattgagtttgactcagactttaatatggcggatgccagtattatgagcaatacatctgctgccaaagatatgtcgatgctgcaagcctccatcgactcaatgaaaatggtgggtgatagtatcggaagacaatattaccgggaagtttctgaagggaatttccgtagcacctatggattgacaaaggaggatacggtcaagattatggaggcgaatattactgaatataatatcgacagtctctatgaggtagctcctttgatgcagaagcagaaggtgatttcatccgctgcaagtcgtgcggaaaacctgagcagtgatataaacttcaagagttacacgatgggtagccatgattatagtatgcggaagcatgagatagagtggcataaaaagatcactatttcactttcctgcctgctgttcttcttcattggtgccccattgggcggaattatccgtaaaggaggactcggtatgccggtcatcgtttcggtgatggtattcatcatttattatatcatagataatacaggctataagatggcacgtgacggcagatgggtcgtatggatgggagtgtggaccagtagtgccgtgcttgccccgttaggtgctttcctgacttacaaatcaaataaagactctgtagtgctcaatgccgatgcgtatatcaattggtttaagaagattgtcggtatccgtaacatacgtcatttattcaagaaagaggtggtgattcacgatccggattatactcgcataccgggtgatttgcaggtgcttactgacgagtgcaaagagtatatagctaaaaatcgcctgatgaaagccccgaattattttaagttgtggatgtcgggcgagaaggatgatgagatgatatctatcaatgaaaagttggagacactcatagaggagatgtccaatacgaagtctgtgactttgctgaacacattaaacaattatccgattatttccgtttctgctcatatacgcccgttccacacctattggctgaatctggctgccggggttattttccctataggattattcttttatttccgtatctgggcattccgtgtccggttggcgaaagatatggaacggataataaaaaacaatgaacaaattcaattcatcatacagaatattaataaataagtgttatggaagagattaaaatggatagaatagaagatgcgattgccgatttcaaagaaggcaagtttgtcattgtagtggatgatgaagatcgtgaaaacgaaggtgatttaatcatagctgccgaaaagataactcctgagaaagttaactttatgttgaaacatgcgcgtggtgtgctctgtgcgcctatcacggtgtcgcgttgtaaagaactggatttgccgcatcaggttagtgataatacttctgtattgggcactccttttacagtgacaattgacaaactggaaggttgtagtaccggagtttctgcttccgaccgtgctgctactattcaggcgttggccgatcctgcttctacaccggctactttcggacgtcccggacatattaatccgctgtatgcacaggaaaaaggagtacttcgtcgtgccggacatacagaagctaccatcgatatggcacgccttgccggactttaccctgcaggtgctctgatggaaataatgagcgatgacggtacgatggcacgtctgccggaacttcgtgcaatggccgatgaacatggactgaaactgatttccattcatgacttgattgcttatcgtctgaaacaggagtcaatcgtagaaaaaggcgttgaggtaaatatgccgaccgaacatggtatgttccgtctgattcctttccgtcagaaatcgaatggactggagcatatggctatatttaaaggtacatggaatgaagacgaacctatcttggtgcgtgtccattcatcttgcgctactggtgatattcttggctcacaccgttgtgactgtggcgagcaactgcataaagcgatggaaatgattgaaaaagaaggaaaaggtgtggtggtttatctgaatcaggaaggccgtggtatcggtttgatggaaaagatgaaagcatataaacttcaggaagacggtatggataccgttgacgcaaacctttgcttaggacacctggcagatgaacgcgactatggagtaggagcccagattctgcgtgaactgggagtgcacaaaatgaaacttctgacaaataatcccgtgaaacgtgtagggctggaagcctatgggctagaaattgtagaaaatgtacctgttgaaacagttcctaatccatataatgagcgatatctgagaacaaagaaagaaagaatgggacatacattacattttaataagtaaaatgccattttgttttcatatatcgaatattatcgcttattttgcaacgaatttcactcaacaacaataaaatagatacaaaatgaatcaattatcagatcgtttgaacagcttgtcgccgtcggcgacgcttgccatgtcgcaaaagagcaacgaactcaaagcgcagggtattgatgttattaacttaagtgtaggagaaccggatttcaatactcctgaccacatcaaagaagctgcgaagaaagccattgatgataacttttctcgctactctccggtaccgggttatccggctttacgcaatgcgattgttgagaagctgaaaaaagagaacggtcttgaatatactgctgctcagatttcttgtgccaatggtgcaaagcaatctgtatgtaatgcgatcctggtattggtaaatccgggtgatgaagtaattgtaccggctccttactgggtgagctatccggaaatggtgaagatggcagaaggtactcctgtcattgtttctgccggcatcgaacaagatttcaaaattactccgaaacaactggaagcagctattactccgaaaacaaaagcattgattctttgttctccgtccaaccccacaggttctgtttacagcaaagaagaactggctggactggcagccgtgctggctaagtatccgcaagtagtggtaattgctgacgagatttacgaacatatcaattatatcggtgcacatcagagcattgctcagttcccggaaatgaaagaacgtacagtgatcgtgaacggtgtatccaaagcctatgcgatgactggatggagaatcggtttcattgctggtccggaatggattgtgaaagcttgtaacaagcttcagggacaatacacttcgggtccttgctcggtatctcagaaagctgccgaggctgcttacgtaggtacacaagaaccggtgaaagaaatgcagaaggcatttgaacgtcgtcgtgacctgatcgtgaagttggctaaagaagtgccgggtttcgaagtaaacgtaccgcaaggtgctttctatctgttcccgaaatgtagctacttcttcggcaagagcaacggcgaacgtaaaattgaaaactcggacgacttggcaatgtacctgctcgaagatgctcatgtagcttgtgtaggcggtacttcctttggtgctcctgaatgtattcgtatgagctacgctacaagtgatgagaacattgtagaagctatccgtcgaatcaaggaagcattggctaaattgaaataagcaatcttagagaatatagaacggtaggctatctcctgaaaaagaaagtctaccgtttttttatgtaatttccttttgtccgtagcgataaaataaaaaaggctgccttccgtagaaagcagcctatacttttttgtcgattgtattattcagccgggtgaatagcttcagacgggcaaacgtctgcgcaagttccacagtcagtacatacatctgggttgatagaatagatatcaccttcagagatagcttctaccggacactcgtcgatacaagttccgcaagcaatacaatcgtcactaattacgtaagccatttttttaagatttaaattattagtactaattcgttcggcaaaaataaagcttttattcattacttggtatgcttctttgattaaattgacttaatttgtacgtcttctaaataagcaacctccctattatgtgctatatttttcgtatttttgcagccaaattactaatatatagcgattatgcctttaaatttacccgataagcttcctgcaatagaattattgaaggaagagaatattttcgtaattgatacttcgcgtgctacgcaacaggatattcgtccgttgcggattgtgattctgaacctgatgccgttgaagattacaacggaaacagacttggtgcggctgctctcgaatacgcctctccaggtagaaatctcgtttatgaagatcaagagtcatacatccaagaatacgccgatagaacatatgcaaacgttctataccgacttcgagcaaatgcgtaacgagaaatacgacggcatgatcatcaccggtgctcctgtggaacagatggacttcgaggaggtgacttattgggaggaaattactgaaatatttgattgggcacgtacgcacgtgacgtctaccttatatatatgctgggctgcgcaagccggactgtatcatcactacggagttcccaagtatccactggaccagaaaatgttcggtatcttcgaacatcgggtgctggaacctttccattctattttccgcggatttgacgattgcttctatgtgccgcatagccgccatacggaagtacgcagggaagatatcctcaaagtgccggaactgacattgctttccgaatcgaaagatgcgggcgtttatatggctatggcacgtggcggacgtgagttcttcgtgaccggacactcggaatactctccctataccttggatacggaatatcgtcgtgatctgggtaaaggactgccgatcgaaattccccgtaactattacgtagatgatgatccggacaaaggtccgttggtccgttggcgcgctcatgccaaccttttgttctccaactggctgaactactttgtttatcaggaaacgccttacaacattaatgatattgaatgatcaagcagcgtaaaatagaacttctcgccccggcgaagaatctggaatgtggtatcgaagctatcaatcacggagcagatgccgtatatatcggtgcacctaaatttggcgcccgtgcagcggctgtgaattctttggaagatatcgaagcgttggtaaaacatgctcacttgtataatgcccgtatctatgtcacagtcaatacgattctgaaagaagaagagttgaaagagacggaggagatgatccatgccctgtatcgggttggcgtggatgccctgattgtgcaggatatgggaatcacgaaactgaatcttccgccgatacctcttcatgccagtacgcagatggacaatcggacaccggaaaaggtgaagttcctttgggaagcgggtttccgtcaggttgttctggcacgggaactgtcgattcgtgaaataaggaagatacacgaaatttgtcccgaagttccgctggaagtatttgtacacggggcgctttgcgtaagctatagcggtcagtgctacgttagtcaggcttgtttcgggcgcagtgcgaatcggggagagtgtgcgcagttttgccgcttgcctttcagtcttgtcgattcggaaggaaaagtgattgtgaaagacaagcacttgctctctttgaaagatatgaatcagagtgatgaactggaacggttgctggatgccggagcttcctcattcaaaatagaaggacgtctgaaagatgtgtcttatgtgaagaatgtaacggctgcctatcgtcagaaactagatgctatctttgcccgccgaccggaatatgtgcgcgcttcttccggcacttgccgtttcgattttaaaccgcagctggacaagagtttcagtcgtggatttactcattacttcctgcatggacgcagtgaggatattttttcttttgatactccgaaatcattgggagaggagatgggtacaatgaaagaagcccgtggcaactttctgaccgttgccggactgaaatcatttaataacggagacggtgtctgctatattgatgaacagggacgtttgcagggattccggattaatcgggtggatggaaacaaactttatcctcaggaaatgccccgcatcaagccccgtaccaagctctatcgcaacttcgatcaggagtttgaacgcatactttcccgcaagtcggccgaacggaagattgccgttaacatactgcttgcagacaacaacttcggtttctctctgacactgacggatgaggacgataacagcgttacgctcactctgcctcgtgagaaagagccggctcggactccacaggctgataacttgaagacgcagcttgctaaattgggaaacacgcctttcgaagcggaaaagatcgaaatctccttctcggagaattggttcttaccggcttctgttttggcggatttccgtcgtcaggcgatagaaaagctgattgctgtccgacgtatcaattatcgtcaggaactggctgtctggaagccgacttcacatgattatccgcaggctgcacttacttatttgggaaacgtgatgaacacccgtgcagcttctttttatcgggaacatggagtgcagcaagtggctgaggcttatgaaaaggaacgggtggaagatgccgtgctgatgttctgcaaacactgcctgcgttatagcatgggctggtgccctatccatcagcgagtgcgctcgccttataaagagccctattatctggtatcgaatgacggaaaacgtttccgccttgaattcgattgcaaaaactgtcaaatgaaagtaaaagcggcacaatgaaacgattccccggcagagatatgcggagtttaacggagcttgttctcggcagagataagtttcgtacagctttgtgctgttctgtcgtggggatgttgctgactctgctgttcctttcatcctgtcactatacgcgtcccgatcttacttccgaggaactgtcggagaagacaaaagattctctgaactatctttatgaccggcattatacctggaatacgaatctggaagtaaccaccgactcggtaacaatggagtgcctgcccatcaaggacacctacatcgcattgtataaaggagatcgggtggttgttgccgagtttgccattcaccctgccgatagtgtggacagtgtctgggtaaagctggcgcatacacaagaggagcaggggtggatacgtgaaacagaattgaaagaatcgtttgtgccgacggacagtatttcgcaggctatccattttttcagtgatacgcatgcttcttatttcatgattatcttcgcgttgtttgttggagtctatctgtttcgcgctttccgtcggaagcagttgcagctggtctattttaatgatattgacagtgtctatccgttgtttctttgcctgttgatggctttcagtgcgacggtttacgaatcaatgcaggtctttgtgccggatacgtgggaacatttctatttcaatcccaccttatcgccttttaaagtgccttttatactttcagtctttttgttgagcatctggttgtttctgattgtcgctttggcggtgcttgatgacctgttccggcagttgactcccgccgctgcggtcttttatctgctgggactgatgtccagttgtattttctgctatttcttctttatcctgatgacacatatttatatcggttatttgttccttgcattctttatctgggtttttgcgaagaaggtgcatcggaatatcagctataagtatcgttgcggacattgtggggagaagttgaaggagaaaggtatttgcccccattgcggagcgattaatgaataatcttttatatcttgtttttatattcaaatcatacttctgaatgatggaaatcagacttaccgaattgaaagatctccctttggtgatggagatttatgattatgcccgtgcttttatgcgtgccaatgggaatgcaacccaatggattgacggctatccgtccgaatcatttatccgtcaggagatagaagacggtcatagctttgtctgtacggacgaacaaggggaaatattgggaactttctgctttatattaggcgaagatcctacttatctgaatatttatgaaggtgcatggcttaatgacgaaccttacggtgtcatccaccggatggctaccagcggtaaaaggaaaggcgtatcggaagcctgtctgaactggtgctttgaacattttgagaatatccgtgtggatacacatcgggataacaaagttatgcagcatattctggcgaaatacggctttcagcgctgtggcatcatctatgtcaagaacgggacagagcgcattgcttatcaaagaatactttaattgtgcgctacctttctcatgcagtctgttcatagataagttgttagtccatatagatcaagcatcagtattatatggagcaagcgttggtttcctcggaggaaacgccagttccctttaaaaggaacggtcgtttccattaaaaggaacggccgttccctcaccgggaaacgacagtttccattgcaggaaatgataggaaactataagttgttgagatctagttatatagagttctgttggcaatgttatagagttcatgttcatgcccgtacggttttgagctaaatgatagtcagctgaccattcagcagatcagcgaacagctgaacttctcgaatcaatcattcttcgggaagttctttaagcgctgtgctggtatgtctccaaaggactatatgaacagttgatctgttatttcttagaatcggcagcggagatctattccgaattgtacgggacgtcctttctgcataaatcctttgttcatcgtttcaaagtagaaggctgcatagtctttgtccaggaagttacgtgcccagaagctgatcattgcattccctttttcaagatttgcacgccagttcagtgtgccgtaaaaagattggctaacatcattcagttccgtccagtagatgcgtccggcagcattgtagtttgcttggaatacaacacggtcgaagatggaacgggagctacaggtgatggcgtattctcctccgatattaagcgtatgcttggggacgaagggaacatatttgccgttgtagtcagcttttactgttaggttgccatctttgtctgcttcatttataatatagtcggtaaaggtggcgtacgtatatccgtaacttgcgttcagacttagttcgttggtcaggctggcgcggagggatgcttctgcaccgtagctgttgcttttgcctgcattgattgtggtacgtccaagaccgctgccgataaattgagagagttgctggtcacgggtatccatatagaaagctgcaaggtcggcccagagttttccttcccacaaagtgagatgagtacccacctcataattccatgaatattccggtttataggttgttgcatcttttacttcgggtatagcaggcattttgtctcctatcattccttcaatcaatgtgctgtatttttcgaactccgcgctttttttaatggcttctaccatcgagtgcgcctgttgcccggtgattatatcagaaaacatttggacgttatagcctcccgaacggtaacccttggatactgtagcgtaaacgttattgccttttctccattcgtattgtaaggcaaacttgggtaataattggacataatcttcagatagtttaccattgtaggcagcatctgctatcaggtctttggcggtaataaccatagggcccatggcaaagttgaagtcgaagttgagtgggtcgcttgccgaattgtacttcatactcatcttttcgtagtccagacgaagacctacagtgaaggatagtcctttggtaaaaaggttattgaaggttgattgatgaaaaatggctccgttccatattggagtatcaaagttgccactgactcttaacgtagggttaagaacactcatgctcatcttaggtgctttattccctaaattttcaaagatgctgttggtatttccttcaatagtttcttttaccccgtcttctttgaaggtaaccggaccgtctgtattcaatgtctgatagaatccaaagatacctgttgtccattcccacttacggttgggcttcgatttaagcacaatttcttctgaaatagtatttagtttctgcttctgggtaagattgaatatgttcttttcagtaaagtcctggtcgagaaacattcggtctttcagatgctgataaccggtaacagcgcttaggatgaaattcttggcttgatattcgacattaaatcctgcattcagcaggttacggtagtagttgcttctatcattatatgcaatctttccgatcatttcttcccgttcttcagtctttcccttgttgacgccttcctgggtgatgcctgtgtaaaagtaaggatatcctccttggtcactatattcgtagctgacattcaagtctagtttaaggttatctttcggcagataaatacctctgaaccgtccacctcctgcattgcctttgtctacccgttcattattgcgtgcagagttttgatagaatcctccggtatgttcgtagaatcctccggtagaaaaggcgaattggtcggatatacggtggtaatgtgttaacgatacattgtagtcattataagttgctgctcccatacggatatctgtaccttgatatgtgaaaggtgacttggtgtgtaccttgatcagcccgcccattgtattacgtccatacaaagttccttgcggaccgcggagtacatcaatacgttctatgtcggagtagttgaaatcgaaagctgatttatcaatataggggatgttgtctacatagagtccgatagccggtgtgttgatacgtgaaccaatcccccgaatatagatagaagtagtcagctttgatccatactccggaatgaaaatattcggaatgagtccggataatcttttcacggagttcacttggttagcctgcatgtctttctgtgacaatacagttgtagctgctggcagctcacgtagtttccggttttctttcggagtggcgatcactaccacttcttcgatgtctactactttaagagaatctttagggaaatcttcagcccatgttgttcctgtcgtcaggagtgtgagggcaatcataatattctttgttttcattcgcagttaatttgtctggtgcaaagtaacggcaaatatataaggtaggcaatcctcatttattaggattatgcttcattttttaagaaatcagattcggtccgcctctatgtatccgttcattactgcatagatggttaatcctgatacagacttgattccaagtttttccgtgatgtttttcctgtgggtgatgacggtagtcagactaatattcagtttgtcggcaatttctttgttgattaatcctttggtaatcagcaccagcacctctatctcacggacagataagatttcctgatgtacctccggcatggcaatcggtggcatatcttttacaggatagccattgtggtgtgcatgttgatgaagcttcaaaagacttttcaccagtttttcttcgggttcgtagatattgagcacaggcacacccgacagttggaattgcgggctgtcactggccagcacaattgttttccgctttcgggggaggaagaaggcattgtgttcaacatagatttgcgccgagatgaagtaatgggcatacatgtccggggtatcatccattagttcattgaaactatggaaggtgcggatggttgccattgggataatctcttccaatatacttttcagtccaaggcaagtgagggtattggactcgataatggctatttcgggtttattattcatcttatcgctgagtttttactgttggtttatataatttgctaccgcttccgcacaccgttctccatcgactcctgccgaaacaattccgcctgcatagcctgcaccttctccgcaagggaacaatccgcgaacagtgacgtgctgtaacgtctctttatcccgtacgatgcggactggcgaagaagtgcgggtttccacaccaatcatcaccgcttcattcgtaaggaaaccatgactgctacgcccgaactgctgaaaaccgagagataaccttttgctgataaagtccggcatccagaaatgaagcggggaagaaatcagccccggactatatgaagactccggtaaatcatagcttaacttcttgcgggtaaagtccagcatacgttgtgccggtgccgtttggcgcctgccaccctgcaaccagcattgacgttccaactcctcctgaaagtgaaggggagtaagttgagtattgagagtcgagagctgagaattgctcagcaatgggttaatggctaataactgctcattttgttgcgcagcccattctccattctccattttccattctccattaattaaatcttccggttgaatctctaccaccattcccgagttactccaacgcgatccgcggttagaaggagacattccgtttactacaacttgttccgggccgctggcggcaggaacaatgaaaccgccgggacacatacagaagctatagactcctctgccttcagcttgtgtcacgaagctgtattcggcagcaggaaggtatttccctcgcccgttcttattgtggtattgtatctggtcgatcagcatagccggatgttccagccggacaccgacagcgattcctttggcttctatcgtaaccccatttgcagccagccagcgatatacatcccttgcggaatgtccggttgccagtatcacaggaccgagaaaagtctttcctgtgttggtttcaatacctttgatttcgttgttctcaataatcagtgcatccattctggtctgaaaatgcacctctccaccacactcgataatcgtattccgcatattctcaatgacacgcgggagtttgtctgtcccaatgtgaggatgggcatcggccagtatagccgcagaagctccgtgctgacagaatacattcagtatcttgtctatatttcctcttttcttgctacgggtgtaaagttttccatccgaataggctcctgcgcctccttcgccaaaactatagttcgattccggatctacggtatgttctctgctgatttgtgccagatcttttttccgttcgcgcacatcttttccccgttctacgataaccggacgtagtccgagttcgatgaggcgtaaggcggcaaacagtccgccgggaccggcacctactacgataacctgtggcttgccttccacattattatatatagtgcgttcgtattcatcctccttgggcatctcattaatgtatgcccgtaccttcaggttgacaaagatagtccgttgacgtgcatcgatgctccgtttcagtattcgggtagcagtgatattacgcaggttaatgcctttttctttagatatatattctttcagtcgctgttcgtttgctgcgatttcgggaaggatgcggagttggtattcttgtgtcatggatttattttaatttaaacttatccgaagagtgctctgaatgcctcttccacctttcttacaggtactaattctatttttagtttttgggtatcaatcccttgcagattatatttaggaagcaggaaccgtttgaatcctaacttttccgcttctccgattcgctgctctattcgatttacggggcgtatctctcccgacagaccgatttctcctgccatacagacttccggttcgacagccgcatccatattggaagaaaggatggcactgatcactgccaggtcaatagccggatcattcaccttcaatcctccggcaatattcagaaacacatctttctgcgcaagcttgaagcctacgcgcttttcgaggacagccagaagcatattcattctccttatatcgaagccggttgccgaccgttgaggatttccatagacagcagaacttaccaaagcctgtgtctcaatcaggaacgggcgtactccctcgatagcagaagcaatcgctactccgctcatcccttcatgatcctgacttaacagcaactccgaaggattgctgacctgacgtaatccgtcctgacgcatttcgtaaatacctagttcggcagtgcttccgaatcggttcttgatgcttcgcagaatacggtacatataatgctggtctccttcaaactggagaactgtatctacaatatgctccagtacctttgggcctgcaatactgccttctttatttatatgtccgatcagcaggacgggtgtatgcgtttctttggcaaaacggagaatcgatgccgaacattcccttacctgggcaatgcttccgggagatgattcaatattttccgtggaaatagtctgtatggagtcgataatgaccaggtcgggactggtgttcttgatatgcacgtaaatctgttcaagtgaagtttcacaaacgatcagacagtcgctggagacttccgaaaggcggtcggcgcgtagtttcagctgtcgtgcgctttcttcaccggatacatagagaatcttcttgtccggcatacgcaagacagtctgcatgacgagtgtcgattttccgattcctggttcgccgccgatcaaaaccagagagccgggcacaagtcctccgcccaatacacgattcagttcgtcgtcgtgcatattgatgcgcggctcatcatcggcttctatttcgctgaggataacaggtttcgctttctgcgtctcgatgcccgataccggacggcggttagtcgtttctttccgtacgatctcttctacatacgtattccattctccgcacgacggacacttgcccacccatttcggtgattcctgtccgcagttactgcatacatatacggttttttcttttgccattttctttttcctttaatataagaacccgaatgcccataacggaattttgtttcctgctgaatattctatatcatctgcggctataaatgcctttttgctgccagctatctgttttccgtccttactttttccgccaacttctattgtgtatttgctgtctatcgtgtagtctgcactacgtgtacagtattctattctatgcagataagaaagttggttcaccataaatacttctctcaatgtgcccttgttcacatccttgaaagtcagcgcataaagtaaattggtattttccatgtatatcttatccggtttttgtagctttttgatagagtcattgtccgaataaagaagatgaattaacttggctctgtccaaatattgcagataggccagaatggtggtacgcgagagttctgccagggcagagagcttggtgatatccaccataaacggaacttcggaagaaaggatacctaacaggcttttcaatttccgtacattactgatatctactccgcattgttggggaagttcaatctcaagtatcaaattcgttatattctcgattcgtgtataatactctgcatttccttccagataaaaaggataatacccatgtttcagataatcctcaaaatgagccagtggtctgcactgagagttgacctcattgcaaattccgtcactgctctccaagatctcttccaatgtataggggcggatatgaatctgatgaaatagctttagatattcacggtaagagagtccttgcatattgtatgatatgcatcggcgtgacaaatctgcttctgcattcagaagttgaagtaaggaggagcctgtgaatactattttcagttcgggaaactcgtcatatatatttttaatctccttgctccaggatggatatttatgtacttcatccagaaagagacattttcctcctttcagataaaactgttcagccaattcactaagtgtatgttgagtgaaatacagactatccaggcttgtgtataaggcgctctgactatcattagcataatgaagtttcaggtattgaagcattaaagtcgtttttccgactccacgtgctccgcggatggcaatcagtcggttatcccaattgattgtatccattaagctcctgatataagtagtggaagtggctgttagtaaccttttatatcttctgattagtgtatccatatccttatttgttttctatggaatacaaaaataggcataatttgttcaacgcgcaaaacaaattcggataaaatctgttcaacgcattaaacaaaaggttcttatagagtgatctcaccagctatcgaccgattcatacgatcacgaacctcatccggagtatatccgtgtcccaataagaacatcaatttagtcacggccgactctgtcgtactgtcatatccggagaccactcctgcctgtagcagctggtaccccgtttcgtaacgttccatctccaccattccggcattgcactgggttacattgacaatgacaattccctgcgcactggcctgacaaagcctgcggataaaccattcctttcggggagcattgccggaaccatacgtttcgagtacgaccgcctttaatcctttggtccctaacatcgtagctactacattctcctgaatgccggggaataacttgagaaccacgatgttcgtatccaataaataatgtggcactaactcctgcttgcttttgttgacatgaatctgtgtctgattatatttaatgtgaatacccgcttccgccaataccggataattgaatgagcggaatgcgttgaagttttccgcgttcatctttgtcgtacggtttcccctcatcagatgattctcaaagaagatgcagacttccggaacgagtgctttcccctccttatcctgtgcggcggcaatttcgatacttgtcatcaggttttcctttccgtccgtgcggagcacccctatcgggagttgggagcccgtaaggatcacaggtttgtccagtccttccagcataaaactcagggcggaggctgtataagccatcgtatccgttccgtgcaaaatgacgaagccatgatagagatcatagttctcatgaataatgtgtaccagctttctccacatatcgggttccatgtccgaagagtccatcggagggtcaaactgataagtatcaatcgggaagttgaatttttgcaattcggggatatgcctctggagttgctcgaagttgaagttctccaatgcgcctgttgcggtgttttcaatcattccaattgttccaccggtgtatattaacaatacggaagtatttaacggggtcatatgctggttttatgctgttgtttttgcaaatataataatataaacgatatataaatagcaaaatgtcataaaagtgcagggcttttatgggagggaaaagagacgggatgttctttttatcagaaaaaaaccgaaaaaagtgatagattgaacgtttttattattacttttgcgacacttatcaaaaacaatggtagaaacagagactatgatgaagtactatccacatacagtcacatccatgtgtaccatgaccctttggggttaatggatagtatttgtgtatctacgtgattcacgcctgtgtaagtaggcaaaactcaaatttaattttttcgtaaacaaccaatcaccctgtaataactatactcgaggggattgtatttaaatatgtatcttcatgaaagtaatgaaattcggcggaacgtccgtaggttccgtgaacagcattttaagtgtaaagagaattgtagagtcggccggcgagccggtaattgtagttgtttccgcgttagggggcatcactgacaaattgattaatacatcgaagatggcggcagccggagattcggcctacgaaggagagttccgcgaaatcgtctatcgtcatgtggagatgattaaagaagtgattcctgccggagcagggcaagtggcattgcaacgtcagattggcgaattgctgaatgagttgaaagacattttccagggtatctatctgatcagagacctttccccgaaaacatcggataccattgtcagctatggcgaacgtctttcgtccatcatcgttgccgaactgatcgatgaggcaaaatggtttgattcacgtacttttatcaagactgaaaagaagcataataaacatacgattgatgccgatctgactaatcagttagtaaaagaggctttccattccattccgaaagtatcgttggttcccggatttatttcttcggataaggtgtcgggagacgtaacgaatctcggtcgtggtggttcggattatacggctgccattattgccgcagcgctcgatgccggcagtctggagatatggaccgatgtagacggctttatgactgccgatcctcgcgtgatctcaacagcttatactatttccgaactgagctatgtggaagcaaccgaactttgtaacttcggtgcgaaagttgtttatccgccgacgatctatccggtatgtcataagaatattcctattataataaagaacacgttcaatcctgacggagtggggacagttatcaagcaagagacttccaatccgcagagtaaggccattaaaggtatttcctctatcaatgatacgagtctgatcactgttcaggggctgggtatggtaggtgtgatcggtgtaaactaccgtatcttcaaggctttggcaaagaatggaatcagtgtattccttgtttcgcaggcttcatcagagaacagtacctctatcggtgttcggaatgctgatgccgatctggcttgtgaagtgctgaatgaagaatttgcgaaagagatcgagatgggagagatttctccgatccttgcagagagaaatctggctacggtggcaatcgttggcgagaatatgaagcatacaccgggtatagcaggtaagctcttcggtacattgggacgtaatggtatcaatgtaatcgcttgtgcgcagggagcttcggaaaccaacatttcttttgttgtcgattccaagtcattgcgtaaatctctgaacgttatccatgactccttcttcctgtccgaatatcaggtattgaatctctttatctgcggtatcggtacggttggcggtagtctggtagagcagattcgttgccagcaacagaagctgatgatggagaacggattgaagttgcacgtcgtaggtattatcgatgctgcgaaagccatgttcagtcgtgagggatttgaccttgccaatttccgtgaggagttgcagaagaaaggcaaggatagtaacttgcagacgatccgtgacgaaatagtcggaatgaatatcttcaactccgtattcgtggattgtacggcaagtccggacatcgcgtcgctttacaaagaccttttgcagcacaacgtttccgtagtggcagccaataagatcgctgcatcttcggcttacgagaactatcgcgaactgaaaacgattgcccgtcaacggggtgtgaagtacttgtttgaaacaaacgtaggtgcgggactgccgattatcaataccatcaacgacctgattcacagtggtgacaagatactgaagattgaagccgtactttcgggtacattgaactatatctttaataagatcagcgctgacattcctttcagccgcacgatcaagatggcacaggaagaacgctattccgaaccggacccgcgtatcgacctgagcggaaaagacgtgatccgcaaactggtgattctggcacgtgaagccggataccgcatcgagcaggaagacgtagaaaagaatctctttgtcccgaacgacttcttcgaaggttcgctggacgacttctggaaacgagtgccgagcctcgacgcagacttcgaagcccgtcgtcaggtattggagaaagaacataaacattggcgctttgtagccaaactggaagacggaaaagcttctgtcggcctgcaggaagtgggcgccaaccatccgttctacggactggaaggcagcaacaacatcatattgctgactacggaacgctataaagaatatccgatgatgattcaaggatacggtgccggtgccggagtaacggctgcgggagtattcgctgatatcatgagtatcgcaaacgtttaaataagggctattaaaatgaagcatattattatactgggagacggaatggccgactggccagtgaagtcattgggggacaagacgctcctgcaatatgcgaagacgccttatatggataagttagcccgcatgggacgcaatggacgtttgataactgttgccgaaggtttccatccgggtagtgaggttgccaacatgtccgtgttgggatataatcttccgaaagtgtacgaaggacgcgggccgctcgaagcagccagtatcggtgtagacctgaaaccgggagaaatggcgatgcgttgtaatttgatttgtgtggaaggagagattctgaagaatcactcttccggacatatatctacggaagaagcggatgtactgatccagtatctgcaagagaagctggggaatgaccgcgtacgtttccatacaggagttcagtatcgtcatctgcttgttatcaagggggggaataaagaactggattgcacccctccgcacgatgtcccgttgaaacctttccgcccgttaatggtgaaacccttagtgccggaagcgcaggaaacggcggaccttatcaatgatcttattcttaaatcacaggaactgctgaagaaccatccgttgaatctgaaacggatgtcggaaggcaaggaccctgcaaacagcatctggccctggagtcccggctatcgtccgcagatgcctgctttctccgaaacctttccgcaagtaaagaaaggagcagttatttcggctgtcgacttgattaacggaatcggatattatgccggcttacgccgtattgcggtagagggagccaccggactgtataatacaaattatgagaataaagtagctgccgctctggaagcactgaagacggacgatttcgtttatcttcatatcgaggccagtgatgaggcgggacacgaaggagatatcgacctgaaactcctgacgatagagaacctcgataaacgtgctgtaggtcctatctacgaagcagtgaaggactgggacgagcctgtggcgattgccgtattgcccgaccatcctactccctgcgaacttcgcacccatacctccgatcctataccgttccttatctggtatccgggcatcgaaccggatgaagtgcagacgtatgacgagatatcggcatgcgacggcagttacggtgtgctgaaagaagatgagtttataaaagaatttatgaatcaaaagaatatccaatgaaatactatagtacaaataaacaagcgccgatggcttctttgcaggaagctgtagtaaaagggcttgccgccgacagaggacttttcatgccaatgactatcaagcctcttccccaagaattttacgatacgatagatactttgtcttttcaggagattgcttatcgtgtagccgatgctttctttggcgaagacatccctgccgataccctgaaacaaatagtgtatgacacattgagctttgatgtaccgttggtgaaagtgacggacaacatctattctctggaacttttccacggaccgactctggctttcaaagatgtaggcggccgttttatggcacgtttgctgggctactttatcaagaaagaaggccagaaggatgtgaatgtattggtagcgacttccggtgatacgggaagtgccgttgccaacggttttctgggtgtggaaggtattcatgtatatgtactctacccgaaaggaaaagtcagcgaaatacaggaaaaacagttcactactttgggacagaatatcaccgctctcgaagtggacgggacgtttgatgattgtcaggcactggtaaaagctgctttcatggataaggaactgaatgaacatctgtcactgacttccgccaattctatcaatgtagcccgcttcctgccgcaagcattctattatttctatgcttatgcacaactgaagcgtgccggaaaagccgacaatgccgtgatttgtgttcctagcggaaacttcggaaacatcacagccggattgttcggcaaaaagatgggcttgcctgtcaaacgttttattgctgccaacaatcgcaacgatatattctatcaatacctgcaaacaggtaaatataatccccgcccatctgttgcaaccattgccaatgctatggacgtaggtgatccgagcaactttgcccgtgtgcttgacttgtatggcggttctcatgctgacatttctgctgagatttcgggaactacatataccgacgagcagattcgcgaaacagtgaaagaaacctggaaggaacatcattacctgctcgatcctcatggagcttgcggttatcgcgctttgcaagaaggactgaaacagggcgaaacgggagtcttccttgaaactgctcatcctgctaaattcctggaaactgtagaaagtatcattggcgaagcggtagaaatacctgccaagttgcaggaatttatgaaaggggagaaaaagagcttgcaaatgacgaaagaatttgcagacttcaagaagtatttgctttctgtttgattgggttttaaagcaaggtataaaagaaataattatgcaagatatagtaaacggacgctgtggttggtgtggaaccgacgaactgtatgtgaaatatcatgatcaggagtggggaaatttggtgactgacgacaagacgctgtttgagtttcttgtgctggaaagtgcccaggcggggctgagctggataaccatcctcagaaaacgggagggttatcgcaaagccttttgcgattttgatgtcgaacgggtggcacagatgactgatgaagatgtagaacggttaatgcactttgaaggcattgtgaaaaaccgtctgaaaatcaaatcgaccattaccaacgccagacaattccttgctatacaaaaggagttcggtagtttttacgactacactctctcattctttcccgacagaaagcctattgtcaataccttttgttcattgagcgagattccggcatcttctcccgaatccgatgcaatgagtaaggacatgaaaaagcgcggattcaaattctttggaacaacgatttgttatgctcacttacaggcttcgggatttatcaacgatcacttgaaggattgtatttgccggaaaaaataaatgacgtgcggaaataattcaaatctgtttaggaatgaactaaacagtagtacacaatagtaactccattctcctccttcccgaaggaggagaatggaagatagaaccgactatcatttagctcataacaatacgaaaaggaataaattgctttgagccgctctactagagaattgaaatatccaaaattgctgtcatctgtcaccaaatgatagataacgcactgattataaactaataaagaggtgacagcacagcgtgacggcattgtgacagcatattttgctatcacaatgtcgtcacgctgtgttattatatcctgctacaataatatactgacctcttggaatgataagtcaggaataccttagcttagttagtttccatgcaatgaaactatagttccaaagccttgaaaccaatagtttcaagctgaagaaactttagttccaaactgcagaaactaaagtttcaagcgctggaaactctagttccaagaccgtgaaactaaagtttcattaggcaaaaaaaataatagttccacagtaggaaactatcagtagtaaggcagatgaaagaatatttttccggaacagggatttaataagcaaggaatactaaatattctcctgtacaatgaatggtaaactcatctgctgttgcttcattaagtgttccctgccaccagttgctgaagtcgcttagcggataaaacaatccttctccttttaatccttcagctccaaaattgatgatagagacctgctgaccgggatgtgaggcaaaactttgcgtatcactcacaggaataaatgtcccgtaatcagtgactgtccgtacttccataccacttctcatatactccacgagcaggctgatgtttcctaatgtatgatcttcccgtttgccggtagcacctacgatggcgattttccgtatccctttactttgcagataatggacagctttggtctgatcattcgtctcctgatccgaaatttgaaggataatagaggaaaaacgctttttatattccggcaggagcgagtctccatcgcctatgatcacgtcgggagtatgtccgcgggaaatatattcattggcggccccgtcgcaacaaacgacgaattgggcttctgccaaaagacgcaggggaagttcgtgcgcaggatattcaccgttggcaagtatgacggcttggggtatatagtgttcgtttatcattgcatgttcattatttttttccatttaaagtagccaaagatagctataatggagtaaagtccgtacaatgcggaggtgaaatagagatctttatagatataaagtccgcaacagacgatgtcgacaagaatccaggcaaaccattgctcgatgtatttgcgtgccagcatccacattccgacaatgctcaacgccgttgtgaaactgtccagccacggaacgttactgtctgtgtattcgataagtatccgggcgatgccgatgaaagacacgataaacacaaggaatagtggcagatagcatttccacggggtatgtataatggggagacttttcttttccccgtgtccccacatccagaagaaccatccgtagatggcagctatcagatagtagatgttgatgccgaagtcggcatacaaccccgcgtcgtaataaacaaagatataaatggccggcatgatgatgcccgccagccacagatagatactggcgcgatactccagccacaggtagataataccgataaacgtaccgaatatctccagataattcatttccatatttgcttatttattcgttctctacgccggcattacccggatcagattctatgggtatgttctcagcctgtcatgttagggcacccctattgcgtgaatcggcggtaaaattacgaatttagcagaaggaaaacaaggaatcatgtaaaaacaagtcctccgttgaaaaaacgaagaggagatttcagcggcatttttgcaatgccgtgaaatctcctcttctcctcatttgtcgtgtattataaaacttctttttctttggtcagttgctcttcatatagcgtgttaccgatcgtatatttgaggctgaactttttggcggttgtgttgtaggtactttctcctgagtcgataattaccggtccgttttcagcatcccatgctttgatcaaaactttctttacatcattagtgccttccactatctgatccgtgatggtcagttctattgtacccgtttggatatcagccttctcgtcgctctcgttgttcatggcatagaatagtctgacagtgttgactccggtaggcttaatcgttttaggcttctgaatcgtcttcggagtttctccttctaaggtggtatggccactcatctggtaactgcccgaatagtcattctttaattttaatagaatcaacattttatatccggattcacttatcggatatcctgttgtactttctatttcgacggggatgacgtatgactggtcaatcttcagacttgctgtctttatcaacacaggaacttcggcggaaataccttcagcgtgcttgattaccgtattctccaaagaaggaatggaatataaatcagtatccaatgatttataatatttgtcctcattcagaacggtccagtattttttattgtaaatatctaccaactcttcgttgatcttcatctttacgttcacatctcggtctaatgctaatgtaccggaactgctgaccgtgaaataagttttcacttcttcgttactgtagcttacttctgtggtccatactcggttgtaagcaccgatcaggtagatttctttctgatattgttctttttcaagcaggtctttttcacaagaagtgatggagagcgttaacaaagaacagaccactattttgtatattgatctcattatatgttcaattttatatgattaataatcagttatatgatagaaaggggaaagttaccaatctccgaatccgtcccatcctggattttgtttcagtttggcatttttatccaatacggctctcggaataggatagaagtacatcttcctgtcaaagctgcgtaatgcatacttatgaactacattgacaacagtatagaattggtctctttcggttgtcttcttggtaacgtccataccttgtaccggtttgttttcttctgtttctgctagtccccaacgacgcaggtcatgatatcttcttccttcgcacgcaaattcgatcatacgttcgcggatgattaactgacgcatcttcacttgatcgctggcatcggcaagggtgatgcccggcaatccggcacggtaacgaatcatgttgaagtagtacatgatttcctccggattatacaaaacatgataagtggtgttatctgccgcttccgtatattccggttctcctttcagttcattcaatgcttctacatagttcaacagtatttccgcatatctgaatacagggaatgttttcggttttattttagcacctgtatgactggtacagttatcctccggatggatatatttctttagagtatatcccgttaagttatagtcttctggattggcagcctgttttgcacagttgccattcacgtaatatcctgctgtaaagttagtcacgttgggagcttcggttcctgttaccgaagttgcgggccagaaacattcacagaatccgatagatgcgtagaaacgcggttcgcggtccagatacattttggcaacggttggtctcagctcatatcctgtggcgatggtaggtacagtacccgcttcttcataataatcaggttgttgcacataatcttctccatctttcatgtagtaggcatctatgagtttctgagtgattcctaagccgttccatcctcccagtttcaacgggaaggcgattgaaatgatgttgttgttcaagggagtagcataaataagttcagggtttttcacagccagtgcttctccattgaacatgtctatatacgaatggtaaggatcgattcctcctactcctaacgggaattccgcttgtgacgcctgagaggatgcatacgtgttttcatcgctgggtacagtgtataatgagtaaataccgctatcgataattctcttggaggcagcagctgatttcgcccatttcaccgggtcatattgctgggctatcatgtttcgtccgtcggaagtggtccagtcggcataatattgattgccgttgtaccacttggaagcttgataaagccggacacgtgacatgagggcggctgccgcatatttggtaggacgttcgaattgagtgctcgggcgcgtcgggtccagtagactgtaagcttcttcgaggtctttgcagatatattccacacattcatcgtacgtgttacgttcgaatgacaagttttcaatgttttcatctaccgacagcggctcttcgggaaggatgactgccggtccgtaaagttccaacagatagaaatagaaggaagctctcatgaaatgagtcaaacccataatttcacgtctgtccaatcctttcaggtctttgcattcatcgatgcgggtgaagatagtgttacacttacggatacctttgtagtattgtccccacatgttgtagtaagaatcgttctgcgtaattttgtctgcatacaagtaggtaccggcgtactcagctttctgccatgacagaagaacttcatctaccgcagtctcgtaaggaccgtaggaaccggaaaacaagttgccttgagcgggcattaatgccgcagttccccacacataacgctccagataatcttgtctggcaaagatggagtcgagtggagtcaggtcgttaaagtattcatcaactgccagatagttgcatgaagtcagcatgaacgggatgattcccagtgtcgtgcatagaatataaaggcttttctttaatatctttttcataatagttttcaattagaacgtagctgttaactgtaaagagaaagtacgctgtagcggatatacggcgccgtttttagatgcctgtcccggatcccatagtttcactgaatcccatactgccagattctgtccgacaaattgcagattcatatcactgatgcccactgtccttagtactttattcgttccgatacgataggaaatatccaatgatttccaacgcaggtaagaaccatctgccagccagaaagtagaagcacggttattgttcttattctctccgtaagtcaggcgcgggaaacgtgcattcgggttttctgtagaaggatcccctgaataccatgccggtgtccaacgattcttcgggtcgtttacgatggatagaatgttgccgacttctccgcctgagaagggatagaatccggaaccgccgtataagaagttaactttggctgctccagtgaataaagcactgatagtccatcttttatatctgtattccagtgcaaaaccgtattgaatttgcggtacattggagtgtgcaataggaacaatatcgtcatcgtcaatttttccgtcagcgttcacgtctttatagcggatatctccggggcgtacttcgccgtatgtctgtttcgggcttcggttgatttcatcctgattttgaaataagcctaatgcaaccaaaccgcgcataacaccataatttacatcgctatacgattggtaagggtagcgcaccgcatcctggtcccaatgtacaactttgctgacagcatatgtcatgttggcacgcaccgtgaaagagttgtcttcgtttattttctggttcaggtaaatgttaccatctataccactactgcgcatacgtcctacgttggtatatgggttggtcacgacgcctacttccgaaggcatcatttttctttcctggaagatattatcacgagtgtctctgaagatatctaccgttccacctattttatcattgagaaattggaagtcgatacccaggttatatttcttggctacctcccagtgtaagttgttggctccgatttgtttttctgtcaatccattggaaccccaacgactaccacctccaaagttaatcaacgtcagatatgggaaccgacgtccaccaccgatctgatcgttaccaacttcaccataagaagctctgatcttcaaaaagttgagccatcctgcatgattctgcataaattcgtattgggtcgggatccatcctaaggctattgcagggaacaaaccgaattgtttgcccggttcaaagttttcggaaccggtgtatcctacgtttccttctatcagataagcatctttataagagtaagtggctctggcagataacgcttgataacgtttgggaatagatgaaatttcatcatttgcttcggtggtttcggtgctttgcatatagtaatgtatcaaaccggttacacgatgttcctgattgaaaagtctttcataggcaagttgcgattcgaagtaatatctccggtcactggcagcactcttggcgaattgaatgttactggctgataccgtacgttgtgtcattaatgaaccgtcattgtaacggccaaaggccttgtataggtccggcattttggagcggactacgttgtgtatattgttattgttatacgagaacattcctctggcagtcaaacccttgatccattttccgaagtcttgacgtaaggtgaaattgatgttcatagtggtccggtttccctttttaaatccggtatggttcaacaagatatatggtgagatctgttctccgtttttaccataagcaggaagcattccattggaataacgtaaaggcaccgtcaggggagtcagataggcttgtgcggcccagagtgcgtcattgttagttccgaatcccggtgctctgtcttctacaatagctccgtccatagccaatcccatgattgttgatgaagttaggttcatgtctacctttgcgcggaaattatatttagcccatttgacattcgtgttgtatttgttaactttgtcttgcttgaagatagcatctttgaatgtacctcctacactgacaaaatatctggcaacttttccaccaccggatacatttaaatagtgctgatgattaatagttacatctttcagtatctctttttgccagttaacgtttggatataagtcattatccagtcctgctttaataatctccagttctgtcgggctataaagagggtccatattgcttaccactcgggcttcgtttgccaagctggcataatcgtatgcttccagatattcgggcatacggggggaataagagagagtcatactgcttttccaggttaccttggttcgaccttcctgaccggaacgggtcgttaccaaaacaacgccatttgcaccacgtacaccataaacggctgttgccgaagcatctttcaagatagagaagctctcaatatccgacgggtcgaggtcgttgaggtttccttcaataccgtcaatcaaaaccagcgcagactggttggcaccaaatgtgctgataccgcgaatccagaactcagaaacatcctgccccggttcgccgcttcggtcaacggctataataccgggaaccacacctcccagcatattggctacggaagttgacggagcactgatggcagccggattgacactggtgacagcacctaccacgctgactttacgttgtgttcccatacctacaacaactacttcgtccaatgattctgagtcgggctccagagatatacgcatcttcttatcggtttgagcaaccactatttctttgctcttatatcccataaatgaaacaatcagcgttgtttttggagctaatgatttcatactgaagttaccatccatatctgttatagttccggttttttctttccctttaacagatatgtttgcacccgggagcggatcaccatgttcatctaacacgattccggcaatttgaattggttcttgttgggcccatatcccttgtgttgcatttcctgccaatagcagaaagaaacacagggttaatttaaaatatagtgttttcatttctattccttattaattattcaatagcaagttttctgatgcagtggttgttttgatctgcaatgtaaagaaattcatttttgtccaaatagacaccccaaggctgatcgaattgggcttccaaaggatccccgtctttgtatcctttcccgctacctgctatcgtggtcacgatatttaacttggtgtcaactttacgaatccgatggttattaacatccgctatatataaattgccttctttatcaatagcaattccacgcggctcattgaattgtgcttcttgtacatctccgtcccggaagcctgcgcctgcaccgggaatatattcttcaatgtctccgtctagagctggccaaccgtccgtatcgcgtgtgagcttaaagcgataaactgcactcttactatgcaacacacaataaacatacttatcaaccggattgtaagcacataaaccattggagcctacattatagagtgtaccgattcgttttgctttgttgggatttaaggttcttttattcttatcaaaaggttgtgtccacaattgtcctgtgttttggcggtatatcacaaaagtagaatctacagggtcgagaacaacactatgcatccatcctccgttggctaaaagctgtcccattttatcagccacccagctcacattagcatcgaataagaaacaaccgaagttggcattatcgcatggaccaaatagttgtttcttttctttatcgataaataaaggttggtcgattaccatgccatccagtaaagtgatggttttattttgttcgatggatgataaacgcgttctcccatcagagtcgaatatgaatacattgtcatcattgtctacagctacataccttggagtattgaatgtggtctcaccgagagttccgtctttattgccaccttctttggcttttcctactactgtagatacggaagaagttacaatatatttgaatgttttttcagcattgctgagttcagcttcttttccggcaatctccacccgtacatggctttcccctccggcttgcttgggcacttgggcataaataacatcaggcttgacacctaaaaccaatgcctcccgttcattacctacttcatccttgaagtaaactttcacttggcttttgtcttctccgaaattggaacctttaacaatgaatttggttcgtatgccaccggaatcgggcataaactctgtaaacttgactggttgattaggatcgaaagctgtgcttttcttgtcttcattacaacctactattagtagcaggaagccgaaaaccatccagattagattaaatgatttacgcatgtttttctataagattttattagtttgaaaaaaggtctttttaggctttctatttaaataaggtttaatagattctaattgatttcaatttgacttaagggcttttggctttttctctcatgtgattaattgttttaaatattacagattcaaaggtgtaaatggctatatataattgtgaagcacactttccgttcggttttcaggatacaaacttaggggatttcaaggaatcaggagcatatgcttttattcatccatgtatatcttttcattcaaaattgctttttttatcatttgcttcgcctttctgttataatattgattatttttgtgacacttaaactaatatgaatatataatgaagcgaaccgttcgatataccgtccttgttttgattgctattataaattctttagttattactacttctctctatgctgttctgccttataatgaacttcatcagttgaatatgagtaatggcttggtagataacatcattacttgtatctatcaggatcaagatcgttttatgtggtttggatccagtaatgggctgagtcgatatgacgggaagcagattcgcaattttagtgtagacaatgcgaggatgtatgtttccgatataaaagagacttctgatgataaattgtgggtaatagctaatgagtatttatattgttttgatcgacggaaagagaaatttgttcttccgtcttttcaggatggaaaaaaggccatttctgtaagtgctatggaaataacgggggattcacttttttggatagtaaaaggcggacaattgcaatgcttgaaacgacattataaattagtgaaaggtgacttacaaatagagatgaccgtcgaagcaggctatccgttttttttagatgagggggaatctttttcgaatttatgtgcttcacaagacgggcatttcttgtatttggttaccgataagggaaatttgttgttctttgataagattgcaggtaaagtggtccggaagttcaaatactctattaattctagtgctaatgctactactatcatgagtgaaggggaatatatttgggtttcttctatagtgggtggagtaactcgtctgcatattcccacgggaaaatctgattattatcagtataatgaggatgccaggttgtcttctttatcacattcagatgcgtatggggtggttgcgttggataatgattcttacattgcagtaacctggaatggatatactctgttagctcctgaagaaaatgatccttctaagttgtcggcaacgccttatacgaatacctcatttttgcagtaccggaatgtagagacaagaatgatttctgtttattatgataaagagggaatactatggatcggaactagaggaggagggattgtctattttgattttagacagcattcttatatgcaatatcacagcaaaaaacataatgaaatctctgctcaggtagctgacaaagatggtcgaatttggttgggcacttaccatgaaggaattatgcgtagtgaccagccttatgctaaatcgcgaccgctgaacttttctcctgtgggcaatcaaaaggaagtcccggtgttttgtacaatcaaagattcatgttctaatttatggtttggaaatgcttccggaaacttgatttgttatgactggagttccgattctttccatatatatccgctcaatcatttagggaaaaaggtaaactcctatatagtggccttaatgattgactcccgttatcggttttgggtatgcacttctgccggattgtacttatttgatcatcagacaggtcattttgaattattctcattgcgtgaagccttgaaagaagatgcagagccatgggtcactgctatttgtgaagataaacagcggaatatctggatagggacagcaaaaggtattgtacgattatcacaggtcaatgttcgtccattaaagatggttcatggatatgaagaaaaagaaaatataggagctcgtgtagttagtgctttactgactggtactgacggaactgtatatgtgggttataaaaatggatttggaatcattcctgtgggcgaagataggataacgtctttttatacagtaaaagatggactttgtaatgattgtatagattgtatagtggaagatgagaagaagcgtatttggttggggagtatatccggtatctcaagatatagccgacaacaacatgtcttctacaactattatatttctagtagcaataaatctgtgatgttgtttaagaatactttattttggggaaataacaagagcttaacttattttgaaccggaaatactgacatctgccaccattgccagcaaaactcttttaactggattggaagtcgataataagcaaatcaatataggtgagaagataaaagggcaagttgttttggactcaaatattgcatcaattgaccatttggaactggtcaatgcaaaccgtgatttctctctccttttcaataatctggctttttcgaaggatctgcaaaaatatagctatcggttatatccatatcaaaaagattggattgtttctgaagcgggtaaggtctcgtttaccaacttgtctgccggttattatatttttgaagtcaaaacattgttccctaataatacggaaggagacgttactgcattgccgataacaatccttccacattggagccagaccgtttggtttcgtttgcttttgattttctcggttttatttttggttggttatattttctatagtttgttgcggcggcaacgtcgtttcaaaaaaatgattcaattgaaacatgaactgacgattgcaaatttggagagaaacgcagaacggcatatacgggaagaacgtgagaatttttttatgaatgctgctcatgagttaagaactcctcttactttgatacttgctcctatacatgatataatgaagtccattaccccatcggataattggtttgattcatttagcagattgcacaagaattgtctttctctacagacactggttgatcgtctgctatatgtacagaagatagagggaggcatgataaaacttcatttgtcagaatcggatataaaggagattgttagtcgggtggctaatccttttctgcaaatggctatggtcaagaagcgggaatttttggtccaggtggatacagtgcctttgtatttatgggtggatgtggcgaaaatagaatcagctgttcaaaatttgttatcaaatgcctttaaatacacttctcagaatggacgtattgaactggctgtgtcagaggcggaaattgacggaagaccttattgccttgtaacagtgtctgataatggagttgggatacctgatgatttgcaacagcacgtgtttgattcgtttgtaacagggaaacgtatcccgcaatattccacgtcaataggtcttggattacatattgtaaagcatacgatggggttgcatcatggatttgtaacgttgaccagtcgtgttggagaaggcagccgattcgttctgcacattccgatggggctttctcattttgcgccgggggaatatgaaatggtacctgatccgatgaagggggatttgttggaagggtgtccggcagaagaacgtccgatggaagaagtagtagaagaaaagaatgagactatggaagagcccgttaacagagtgaaaaataataaggaatttttattgattatagaggaccacgatgagatgagagaatatttatgcagtctatttaaagaagattataatgttattgaggctggaaatggagaagaaggggtggctatggctgataaatatatacctaaattaatcatatctgatataatgatgcctgttaaagatgggtttgaatgtagtcgggagattcgtgaaaataagcggacttttcatataccggttatctttttaacagctaaagcagaggatgctgaccggttgaaaagtttacaaataggggtagatgactatataatgaaaccttttaatccggagttattgaaagagaaggtgaaagcgttgatagaacaacgtgatctgttaagaaaactttatgcgaaaactcttatgctggatgaagaggtactggaatcttcagaagatgttcaggatgtttttatgcctaaaatgcttcagattatagaagaaaatttatcaaaccggaattttacaataaaagtgctgacggacaaattgaatatgagccagccgaccctttatcgcaaggttaagcagaaaactggtttgtcgattatagaggtgattcatggagtacggatgagtaaagctgcctctattatcatgagcgggcgatatagcagtctgacagaagtggcggaaatggtagggtatgattcgatgatttccttccgtaagcagttcgttgcacagtttggggtgcttccttccaaatatatggaagagaaaatgaggaaataagaagccgcgttccatgttggcggcttctggcttgtctgtttgaatagttattgttaaaaacggaaagagacatgggccataacatttgtacccgcttgcgcagcgtatccggcagagtctattctgtgattcacatccttgtcgtaagaactggatgcccaaccgttgttctcgtattcttcgttgaagaggttgtagacggtcacacccatagttacttctttcaccacttttcggggtttgaatgtataggccagatttaggttgctcacgaaatacttatccagagtcaatgcttccacttctgcatttgtcatatattgcttgccgacaaattgggattgaagggctgcttcgaatccttgataggtaaaagcaaaacggttgttcagcaggaaatccggtgaaaaggcgatgcgagtactcttatgagaaacgcttacgacgtccagtaagttccagccatcgtaaatgggaatgttttctacaaaattcttgatacggtttttgctccatgtcgcattgatatcccattggaaccatttacagggcttgatacctagcatcagttcgattcccatccggtaactgtccggaacgttttctgtcagtgcttcaccaatatcgttcaaagctccggtgaggacaagctggtcggtataatccatgtagtagaagttggcgcctgctgtcagccaatgattggcgaatgtgtatccggcttcgtagtcgagcagcttttcagctttcggataactgtcgggatcgccatccgtataattatttcttgtcggctctttttgagctacggagaaagaagcgtagacacgatgattggggttgatattccagttcagtccgactttcgggttgaaaaagtcgaatttcttgtctacagccagcggacgcaacgcacttttattccagtcgtatttgtcatttgctccgtcgatggtgtagtcgatgtgccggtattgcaggtcggcataggcacttagtcctccggtaaggtcgtagcttgctttcagatagatgttaccgtcggttttcttcgattggttgcggtagtattcatggtcgggagatagtgcgccgatgtagttctttacccaagtcactttcccgaagttattgccccgatattgattgatgcctccgcccaaagatgccgttagtcggtggttggtataattgagggagaaaacacccccgccaaacttattatccattttcttctggcggaccagatcgctttccgaaatttcttttccgtctgttgtaaaaggtttcagaccgtattctacgaaagatctgtcttctttatattcctcatagtagccgtcacctttggtgtagtgcagagctacgttcagattccatgcggtggagaaagtatggttgaaaaggagttgataattcttttgcagatagttatccgtctggtcggcataataatgtttttcattatcgtctccggtatattcgccgcaagggttataccgtcttccgtgttcttccatttctgctttagtagcatatccccaggcatgatacgtcttttcttttcctgtgaatgcgatcagtttgacagacgtattttcggcgaaatatcctccttgcagatagtaagagttgagattgacggaggcgcggtcgatatacccgtccgtaccgatgttggaaagtcgggcatcgaatgtccagtgattgttcagtagtccggttcccacttttacagtttccttgtgggtgttgaaagaaccataggaaccgttgaactcggcatacggtttcatggatgcaccttcggtctgcatattgacactggctccgaaggcaccggcgccgttggtcgatgttcctgcgccacgttgcacttgcatatcctttacggaagaagagaagtcgggcatatttacccagaacagattgtggctttcggcatcgttcatcggaatgccgtttacagtgatgttgatacgcgtgccgtcagtgcctcgtacacgaagagtcgtatagccgatgcctgatcccgcatccgatgtggtcagcgtggaaggagtcatgctcagcaggtagggaatatcctgcccgaagttcacttttttaagttcggctttgcctatattggtaaatgctacaggagtttttgctgtagcacgtgtggatactacctgcacttcttgcaggttgattactttcagactatcctttgcactcgtttgtgcatggacagggaagcctgcgcccaataaggcgacggccatcatcatcatttttttcatcttgcttattaattagttctctacgccggcattacccggttcagattctatgggtatgttctcagcccgtcatgttaaggcacccctacttagtgaatcgttggcaaaattactgcttttgcgggaggaaagcaaaaaaaacttttagatttgctaaaaacaatataactttgtagtttgttgaaatatgacaagtcagctatttattcattttaatataattatcaaattatgctactattatttcaggcgacagcaacacagcttgcggattctacacaaatcgccgcagataaattaatggaagaagcgatagccaatgcggacggattggataagctttctctgatcacccagcaattggtagatttcggtatccgtgccggagaacgcatcttgattgctacccttgtcttcatcgtaggacgtttcctgatttcgatgctcaaccggtttgtcggacgtctgatggacagaagaaaagtggatataagcatcaagacttttgtgaagagtctggtaaatattctgctgaccattctgttgattatttctgtagtcggtgctttgggagtcgaaacaacttcatttgcagccctgttggcttctgccggtgtggctgtcggtatggcgctgtccggtaatttgcagaactttgccggcggactgatcgtattgctcttcaagccttataaggtaggagactggattgaaagtcagggagtttccggaacggttaaggaaatacagatatttcacaccattctgactaccggagataataaagtgatttatataccgaacggtgcaatgagcagcggagtggtgacaaactataatacacagacaacgcgccgtgtagaatggattgttggcgtggattatggagaagattataataaggtacagcagattgtccgtgatatactgacggccgacaagcgtattctgactgatcccgccccgtttattgcccttcatgcgctggatgccagcagtgtgaatgtggtagcccgtgtgtgggtgaatacggcagattactggggagtttattttgatataaacaagactatttatgaaacctttaatgaaaaaggcatcaacttcccgttcccgcaacttaccgtgcatcagggaaattgatcactatacgatatatgctaaaacgagagagtttcacttcggtgagactctctcattttagttcgcccagcacgaacatattctaacgggtgtaagtccctaaagcgccctgacaacgggaagtatatagccaacggcaagggtgtccatcgtgaggtggaatctgaaggaagcctgcggcaaatatctggtctgacgtacagaaacttgatattaaggcttaaggatgtggataagtttgctaaacaaaacgaagtcctatagttgtccggaacatccaaagtaaatcaagcagacataagatggaaagaatatgtccataactggggaggtctcacgggcgaggaaaaataaataaatacagtcaagcagtaataacgaaccgtgagaagtcagcagaggtcatagtaaccgacaaggtaaaaaaatcggcagtcggtgaaggactgaacttttaatcaaacaagtaccatttaatactttatgaaagagtcaatgcggaaaatcagtaaaacgaactgcccacaaatggataggacagcatccgacgagtatgtgggagtgcagacttttatggagataaaagatgagcagcttgtggaagtgcaattggaagaaaacaatctgttggaactccttctaagtccatcgaacttgaatgcggcataccgccaagtcgtaaggaatggaggagtgggaggtgtcgataagatggagacgagcgaactgttgccataccttaccctccataaagacgaattgttggaaaagatacgcagggggaagtatcgtccgtcccctgtgcgcaggttagaaattccgaaagacaacggtaaaactcgcccattaggtatcccgacagtggtagaccgctttgttcagcaggcaatcagccaagtgttgataccgctttacgaacctcagttcagtgacaacagcttcggcttccgccctcatcgtagtgctcacgatgcactgcataaggtgcaggaatatgcagaccaaggttatcgctactgtatcggtttggatttggaaaagttctttgaccgtgttaaccacagcaaactgatagaggtcttatcccgaaccgtcaaggacggcagtgtaatatctttgatacacaaataccttaatgcaggagttgtagtatctcacaaatacgcggagactgccgagggcgtcccccaaggtggtccattgagtcctatattgagcaatattcttcttaatgagttggaccaggaattggaacgcagggggcacccgtttgtccgctatgccgatgattgtctgatccttgtccatagtcttcgggcaacggagcgagtccgtgatagtatttccgagtttatagaaaagaagttattcttgaaagtaaacaaagagaagacagaagtcggttccatctgcggcaagaagtatcttggacactccttctactgaagagccgaccgtaaatgtggtcttaatcttcataagaaaagtcaatccaagttcaaacgcaccatcaagcacctgaccagccgtagtagtggtcaaggctacgcttggctgaaactccacctgacgcaatacatccgaggttggctgacatactatcgttatgccgatatgaaagattttataatcaaaacagcgaagtggtacaatcgtcgtcttagaatgtatatatggaagagttggaagcgggtacgtacacgttttgccagcttgcagaagtgtggcatccctcgtcggaaatcttgggaatgggcgaatacccgtaaaggctattggcgcattgcggatagttggatattgcatagagcaatcacaacagataagcttgtaatggcgggttatccgtcaatgataattctttatacccaattgcatcgcagttaagagaaccgccgtatgccgaacggcacgtacggtggtgtgagaggtcggaaaacgaaagtaggaggaaaacttctacttcgttttcctcctactcgattatgaacaaattgtctggtgtgattggaaaatttctttttatttgatgccgaaatcctcagcaaattcatatcggtcttctttgatccccagtacatggttgattttccttcttttttcaaggtccttaaagtagctttctacgacctgatagagatcaaaattgctggttgatcctgcggcaagatcgagtgactccaccattttctctactgcctggtggattttccctgcgtctatcagatgcagttcgttgctgtgtattaaatatttctccataactgcaatgttttaatgttatattgttataacgtatcatagtgatggaaagttcaatccccgaatcttcattgcgtcttgttgtcaatcacattttaacagacaaataggttagaatctaatgtcagattttggcgagtgcctgttccagatcggctatcaggtcattgatatgttccgttccgatggatagacgtacagtgcccggataaatctcctgttctgcaagttcctgcgcattaagttgagagtgtgtggtacttgccggatggatgaccagtgatttcacgtcagctacattagccagcaacgagaaaatctccagactgtcgatgaagcggtgtgcttcttcctgtcctccttttacttcaaacgtaaagatggagcctgcaccattcgggaaatagcgttgatagagtgcatgatccggatgatcggagagtgacggatgattgactttcttcaccttcggatgattattcaggaagttcaccacttttagcgcattttctacatgacgttctacacgcaaagaaagcgtttccagcccttgcagcaggatgaaggcattgaacggactgatcgttgctcccgtatcccgtagcaaagtggcacgaatgcggatgacgtaagcagccggaccggcagcgtctacaaagcgtactccgtggtaactcggatcgggctctgtcaactgtgggaatttgcccgaagctacccagtcaaatttaccggagtcaacgattactcctcccaaggaactgccatgaccaccaatgaatttggtggcggagtgtaccacaatgtctgctccgtgttcgatggggcggattaagtagggagtgccgaacgtattgtctataatcaaaggtattttgtggcggtgagcaatttcggataccgcttctatgtcgataatattggaattcgggtttccgagtgtttcgataaatacggctttggtgttctcctgaatcgctttttcaaagttggaaaggtcgctcggatcgacgaaagtggtggtaacgccataattgggcaaagtatgcgccagtaagttatagcttcctccgtaaatcgttttggcagctacgatgtggtcgcctgcacgagtaatgttttcgaaagcataagtaatggcggcagcaccggaggcaactgccagacctgctatacctccttcgaggacggctacacgttcttcaaaaactccttgggtggagttggtcaggcggccgtagatattgcccggatcttgcaagccgaaacgtgcggctgcatgagcagaattgtggaatacataagaagtggtctgataaataggtactgcgcgtgcgtctgttgccggatctgcttgttcctgtcctacatgaacctgtaatgtctcaaagtgtaaattctttctttccataatcgtatgctttttaagtttaatattctctctttattttcttgcaaagttatgggatgtagatatatcgaacaatatatagtagaaatatagaaaataatgctatttttgtatcgttatacagaataaggcaactgctttattcttaaaaatcacctgttagaagaatatttttcttatggatacttttgagaaattggataaagtggatttgcagatactccgtactttgcaagagaatgcgcggttgacgaccaaagagttggctgcgcgggtcagtctttcatcgactcctgttttcgagcggcttaaacgtttggagagtgggggatatataaagaagtatatcgctgtgctggatgccgaaaagctgaatcagggttttgtggtcttttgtagtgtcaagttaaggcggctgaacagggacattgcggctgagtttacccgaatcatacaggatattcccgaagtgaccgaatgctataatatatcgggcagctacgattacttgctgaagatccatgctcctaatatgaaatattatcaggagttcattctgaatgtattgggaaccatcgatagcctgggttcgctggaaagtacgtttgtgatggcggaagtgaagcaccgatatggaatacatatttagtgggaggattgatgtatttcctattttggctactctttgttttcggctcaggtttccggtggattgccgataatgtctctgtataagctgccgtcatggtccttgtattttgcgtattggtagaggcggaccagtatatcactgtaatcaagaatggctgtatttgatttctgtgataaattggtgcccaggataccactgcctatgataccgggattgtataatacggtgtcttgtctgatagagttcattatcagttctgcacaaatatagtctttaatccttgcctcttctagtcgggtcgtgatgtatgagttcagatggcttttgtcatgttgagtcataaagccgtaccatagtaaacacttcatccctaattgggtagcttctattaatatatccagataggttagtcccgatgttcctttcttatctatctcataaggatcgatatgaatgaaagaatctttggggagtgatggcagtaatctcataactccttcaagagaatcggtattatataggcggacggatgtctgtagttccgcttgcttcgcatagcgttctacattatccaaagcactcttttctatatcgaagaatagaaatttttgggcctgtcttcctaatacttccattgctaaagccggggaacctaaatagtatcctctttgcatttctgcactttctatcttatagtaaatggaatcctttaaaacttgattgtcttcctctgctgctttttctaagaaatagtaaatgccatattgttgttccgaagtctgctgcatcggatagaaagcgcaggctgaatttgtttctacatagatttgtggatgctcgttccgaagaacttcgcaaagtatcagatgtttcagtacatcaggctgtttgccgtaatgagtataagttgccatgatactaaaggtttatagtgatgatataaatggtatacagcaaatatacgggataattcttagattcttgcatctgatttccaaaattatcctgtacatttgttatgtgatatgaaccttattctttgaacgcaatgaaatggcaacattgtaaatagcttcgctctatatggatgatgaacaatggtgaaatctgttgttcaggtcttttgtggctaaacaggtcacctgatattttattatattattttagaaactatataaagaagcaattacaatgaatacaaatatttatccgcgcaccaatgaccttcagaccgtctatctgaatgcagttatcaataatcctcatataaaggttggtgactacaccatatacaatgattttgtgaatgatcctgttcagtttgaaaagaacaatgttttatatcattatcctgtcaatggagaccgactgatcatagggaaattctgttcgatagcctgtggagctaagtttcttttcaatagtgcgaatcatacgttgaattctttatcgaattatccgtttcctatattttttgaggagtggcagttggataagggaaatatcacttcggcatgggataataaaggggatatagtgattggaaacgatgtatggattggttatgaggctgttgtcatggcgggcgtacatatcggcgatggagcgattattgcatcgagggcagtagtcaccaaagatgtacctccttatacgatagtaggcgggacgcctgcgaagaaaatccggatgcgttttgacgaagatacgattgtgcaattgcaggaattgaaatggtgggattggagtactgataagatagcccattatttgcctcatatcatgaatggggatatggaggaacttatgaaataaaaagtatctttgtcctcaaacaatatatgtatgaaatttataattgaatccggttccctgaccgatattgacgaactggagaaactatacgatgaattgaatgaccatttatcggctactaccaattatcccggatggataaaggggatttatccggttcgtgaaaatgccgttgctggtgtgaacaatcagagtctgtttgttgccagatgtggcgggaggatacccggttctgtcattttagaccatcagccggaagaggcttatgagaatatccgatggaaagtagaggcagattacagtcgtatttttgtagtacgtacttttgttgttcatccatctttcctgcaaatgggagttggtcgggcattgatggatttttcactggaactggctgtaaattcaggaatgaaatccatccggctggacgtctatgagaagaactttcctgctatctcattatacgaaaaatgtggattcgaatatattgataccgtagatttggggttggggcattacggactggattggttcaagttgtatgagaaggttatttgaactgtaataatgacatagaatggaagctccgatagaatctatgaagcatagattttgttggagcttcctttttataatgaatatggcatttattccgaagatttaaataatactctttttcatttcaaaaacaatgtccttgatacatacattttctgatagattcagtagatatcggatcgtatttagtaaatcatcgggttgtaccatttcttcatctttaaaaggagttcctgcttttttcgccatttcagtattcacccatccggggcaaagggtcgtaacacggatgcccaatggcgctaactcacggtacagagattctgccaatccgagaaatgcaaatttggtggagccataaatacctccatcagcaaaaccatatttagcggcacgggatgcaatattaaatatgtatccgtctttctgcgctttcattatctccgtcaccgtttttagtattccatattgagcgatgacatttatttccatgatcttcctgaagttatccacagattcgcttagagagccgtccataaacatggcggctgcattcaccaagatatcgacggtgccatatttttgatggatgtttttgatttcagtatctacctttgtacagtctgtgatgtccaacggcaatacaataggttcttgtacatttttgtccgacagcatgatttcatcatgcactttctctaagttctgcctgtttcgggctatcaataccacccgataaccatcctttgccaaacctgctgcaatgacagcaccaataccttgacttgctcctgtaataatagctaatcctttttgcttttccataacctgaaatttaagtgagtttataaattatgatgtaagaaatactgtgacggtatagggacaaaaaaagaagcctcggaatattccaaggcttcttactaattatatgttttagcacattctgtttgatttcttcggcgcaaccgtagcagacaaggctaattcctttgaattttgccctttccctatgaatgcgttgtaatatagggaaatcaaaaatgtctgtgtgtttagactgttccattagttgcgatttcatttgcaaaagtaggcatatcttgttgaataagaaagtatttcgccccgaaaataatgatggttatctacttaaatacttattgatacatctccggtcccaatttatccctcgcttgacaattttggccggtatacctgcaatgattacattcggctcattaaattcttttgttacgatgcttccccaaccaacgatactgttgtccgctatcttcacattcttgccaatcttgctatctttccctatccatacatgcttgccgatttctatgcacttggcaaaattgatcggttcaccctttaaatctgttattgtatgtgcatcagtacaccatatatcaattccccagcttaactgactgtcatctccaatactaacatatgagtcatcttcctgcaaatacaatgtaaccccattgataacaacacggtttccgatatctatccggcaattgttggctgttcttgaaacaccgacacccagtcccggcagctgtccgatgattagctttaatcccgtcatgcctaatatggtagaatatcgtaagatgatcgttcctatatttacgatattattatccccttttacgatcagaagaaatccgttgctgagtagcaaatcctctgcactctcttcagtgtcgaaatacattgagatatgattgttatttcctgtgattgtaatgttagcctgattaataatcttattgaatttatcattcggagaagaaatgcaatcaattctgttgtgtgggaatattaatgtaaattcattgttctgtccggtaatctgttccatatcattaatacttgtgggttatatccgtatctttttgatacgacttttatttcattcctcaaatgtacgaaaaagaataaactaaaactcatccgatagtcctttttcttagcttgtgttctcatggcgatttctaaagactttctgtactatatttattaacttcgttgcctgatatttattcgtgccactatagtggtacgcaagaagaactatagttccctttgcgttctactatagtagtccgcaagggaaactgtagtggtacgaactaattataggactaaaaatataaatatcagggaaggaaccggttagttattcgggcttttttcataatgcttttaaccggttatcggattctgataatgagcgttataaaacaagtttttcggtttaaattctgttttttcattcgaatgataatacatgatcaacttgttcccgatagtgtatattatgcaggatgatgatataaaggtaattattagaattgatttcttatttattatatatagctttgtaacttaaaaaaacagagaaggtatatttgaaataaaagttttacaacaaataatggtgtatacaaaataaatatcgggcgaatcactatgtacagaataatcatcttattaatttcattgatactatcagtacaatgtttttcacaaacggagtttactacttatctgtttgacatatccagaaacagagtgataccgatagcggtttatcagccgaagaaagtaaattcaaaaacgaaagttatcatattcagccacggctatgatgggaataaaaacagtaagtcgaaccaaacctattcctacctgacacgttttctttcacaaaaaggtttttatgtgattagtatacaacatgaattgtccgatgatcctcttttagcgatggaaggcgatctcatgcagacccgtatgccgaattgggaacgaggaaccgacaatatactttttacaattcaggaatttaaaaacttgaaaccacaattgaattggagagaactcatcttgatagggcattctaatggaggggatatgacaatgctgtttgccactaagtacccgcagttgatcagtaaggctatatctatggatcatcgtagaatgatcatgcccagaacgttgaagcctcgtctgtatacattaagaggatgtgactatgaggcagatgcgggagttctgcctaccggacaggagcaggaacaattcagaatgaaagtagtgaaactggatggagttacacatagcaatatgggtgagaatggaacggcggaacagcatgacctcatcaatcagcatatccgcaaatttctgacggaaagataactgaagcatcatttctattttatccggcagttttaaaccgaaagcctgtttttcttgtaactttgctgccgattttagaaaaagaagtttggaatgaacaataaatacgaagaacggctgggaacagaacgtatgttaccgcttgttttcaaaatggcacttccggcagtggctgcacaattcgtcaatctgctttatagcattgtcgaccgtatatacatcgggcatattccgggaattggcaccgatgcgctggcgggtgtaggggtgactacctctctcattatactgatttcttctttttcggcaatagtcggcggcggtggtgctccgctggctgccattgcactcggacagggagaccgtgtacgagccggaaagatattgggaaacgggtttgttttgctgatattgtttactttgctgacttctgtcatcgcatatacttttatggaacctattctcctctttacaggagcttcggaaaacaccttggaatatgcggttgactatctttccatttatctcttgggaacgatatttgtcgaaatatccacagggttgaatagctttatcaacgcacagggacgtcctgccattgccatgttttcagttctgatcggagccttattgaacatcattcttgatcctatttttattttctggtttgacatgggcgtgaaaggtgctgctttggctacggtactttcccaagcgtgcagtgcggtgtgggtggtaagtttccttttttcccgacgtgcctctctgcctttggagaaacgatatatgggactggaccggaaaattatcctttccatattagctttaggagtatcccctttcattatggcaagtacggagagtttggttgggtttgtcctcaatagcagtctgaaggagttcggagatatgtacatcagcgcattgacgattctgcaaagttcgatgcagtttgccagtgtaccgttgaccggatttgcgcaaggattcgttccgatcataagttataacttcgggcatggtgacaagcagcgtgtgaaagattgcttccgtattgtattggtaactatgttttccttcaacttgatattgatgcttttcatgattcttttcccttcgacggttgcgtctgctttcaccagtgatgcaagactgatagaaaccgtacgttggacaatgcccgttttcttgggtggcatgaccatcttcggcttgcaacgtgcctgtcagaatatgttcgttgcattggggcaggcccgaatctctatcttcattgctctgttgcgtaaagctatcctgttgattccgctggcgttaattttgccgaactttatgggagtaaccggagtgtatgcagctgaggctatatctgatgcgactgcggccatctgctgtacgctgttgttcttttggcagttccctaaaattttgggaaagattaaagagaatactttgcgtgtggagtaatcgtttctttataatttgttttttacttcacagatatgcccagcattacggttgtattctgactgttattccagaccgaatgaggtatttctccttttaccagaaaagcttcgttttcattaataatcttttcttccttgtcaagcagaattttggcttgcccgctgatcactataaataaatgattgtgtgggtgagtatgcagcttgacaggtccgccgccgtccggttctaaataggctattgcgccgtctattatttcaccacagttgccaaaaagttttttggctaagaacttcaagtgttccggtggggtgataaatccatctgattcattcatgactattttatttatgctatagtactgcaaatgtagttatttgatttgaatttatgcattttcattcgtaatgattgtgtgttgttgaagtctgaatggaataaaaatgcgtaaccgattacgtgttttttgaaaaatacttgcttgtattattgaaatccgatatatttgcgtaatcaattacgtatttaataacgcaagtagtaaagacatggacttttttaatcagacggggaaattagctatcggaagcagactacgtatgctgaccgataaaatcaccgtagatgcggctgcaatctacaaaatgttcggtgtggacttgaaacccaagtggtttcctgtcttctttgttttatcacgtggagaggcaaagacaattacgtctattgctaaagagataggacactcgcatccttcggtgagcaatatcataaaagaaatggtagctaagggattggtgaaagagacgaaagataaatccgacgggagaaggaatatggtaatgttgtctgccaaaggaaaaagaatgtccgactcttttgcggagcaatgtatagatgttacgtccgctatcgagcaaataacgcagcaaacccggaacgatctttggaaggcgattgaagaatgggagaaccttctgtcggataagtctttgctggagcgggtgaaggatgcgaagcaggagcgtgaagctaaggatatccaaatagtatcttatgaaccatgctatcaatctgctttccggacacttaacgaggagtggattactgcttattttcgaatggaagaggctgactacaaggctttggatcatccgcaagaatacattttggataagggcggagacattttggtagccctttacaagggtgaaccggtcggagtatgtgctttgtgtaagatggatcatccggtctacgattatgagttggccaaactcgccgtcagtcccaaagtacagggcaaaggtatcggagtgttgctttgtgaagctgtcgtgaataaggcaaaagagttgggcggcaaaagaatctttatagagagcaatacacgtttgaaacctgctatccatatctatcacaagctgggattcagggaacttcccgaataccacacgacttatgaaagaggagatatacaaatggaattaacgatagaagagtgaaaaatgaaaaaggccgatagtgaatttatcaaggggcgtattgccccttgcggactgcattgcggaaagtgctttgctttttctgacggagagatctcttatcatagcaacgaacttaaaaggtcactgggcaattttgatgtgtacgcacagcgttttgtggacttgcttgacgaacccgtctttgcaaagtatccggactttaaggagtttttgaatcacctgtccgtagcgacttgtcagggatgcagaaaggagaagtgcaagttgtttaaaacctgcaatgtacgtgtatgcagcgaggagaaacaagttgattattgtttccagtgcagccgcttcccctgtgaaaacactggtttcgacgagcatttatacaaaagatttgtaactatcaacaagcggatgcaggagatcggagtggaaaagtattacgaggaaatcaaagatattcctcgttactaggtcgtcggttcctctctttatctcatttcctgtgcgtaaatgttgatggctcgcagtgcctttgaaatctcagtcggggtgatgtcctgacattctattcttaatactttctcccagtcctccatatctacattccatttgtagatttggggacatagggtgaaaagagccgcgatatgttttatatcccgtgcattccttattgaggttcggaaaatgagtatttgcccttccatagttgctatcaattacttttgtttacctcgcaaaggtaggcttaaaaaggcttcgatatagaattattcgacgaatgccgtgattactcatgacgaattaagtaatttgggagactaacaatagggcacttgtatagttgtccttctccatttcaaatctttatccggatatggcgataccccatacatcgtcttttagtgcttgaccccttcaaataaatcgcggttgtctcgtgaactctgtgaattgcgcttgaagtcattgaatgtataactgatagtcaacgtaattacagggaatttcggttgaatccgtgtgattgattgtaaattggctgtctcaatgtcacttttgtaacgggcagaattgaatatatcccgaaaggagagggtcgattgcagatgaggactgaacaactgctgacgaatagccagattgacaaaccaaaaagaatccgacctcccttgtgtagtaaccgaaggccccacgaaattcccgtccagctgaatacgggtattcttatgaacccgaaaaaggttattgactgtaaagtcataattggtactcgtttccttttttcctcccgaatttatattattcattaccttataatagtaaatatttccgttgacgtccagattccaccatttagtgactttcaactgggtacttagctccacgcctaacgaatagtcattgcccacgttagccatggagtctaatgtaactcctgcctcgtacggaacacgcaagcgttcaatcttgtctttacgttttctgtagaacaggctggattgcaaagtgtgctctcccatagtctttttgtaattcagctcgaaagaatgtatgtattcgggccggatatccggattgccaatttcagctgtgtaataatcgcgataagtaatgtaaggctccataaaaaagagttccggacggttggtgcggtacgaataggcgaatgtcagcttctgttcgtgcggcagcgtgtatcccaaatgtacggatgggaacacctcaaaacgattcaccgtgcggtccgaaccttcaatagaacttctcagcacctggtgtgtatgttcacctctcacccctatctgtacgtcaaatgctttatagctgtcacttcccatgacataaacggaatgaataccccgctgaaaatagaaagtgttatagatatcctcccgccaataaaactcctttttctccggattccagaattgcatcgtgtaatcgccgtcttccagatacgaatgatattgatacccgctttccagcagaccggtcttgctataaggatagctgtaggacagattgccttggactgtccagcgtttttcgtcttcccacgcacggtgtccctgctggcgttgttcgttcttgtcgaaaaggtcactttggaaatattcaaggggattgtcttcataacccagcataaagctgccggttagggtatgcccgttgtcgttaaacttatgggagaatcctgcttttccaatattgaccgtcgagtgcaggtcatatttgtcgcggctaaaatagttggatggggcggatgctgcggcggaattggaatgtgtctctgtataatcgaggtccccttcgcgggtaaacttgtcatatactacctgcaactctgcattgacggaggttttgggagtaaaagcgtaatcaatgcctccccgtagtccatagtgataattctttccgattcgcggaccatcggacagggaagtggtggtcttgtcgctaacaacagtcgtcttcctctgttcgaaatcgctcttacggatgggattgttccagtgcccggcaaggtgccactgtaacttcttgtgttgctgggacaacaggaaatccagaccgttggagagagctgtgctgccatatgcattgactataccgttgatacccgcttgtttgtttttcttggtgatgatgttaatcattcctacttctccgtccgtatcatagcgtgccgaaggcgtagtaatgatttctatgttctctatctgggtggaaggaatctgttgcagggcctgtgaaccggaataaaagctgggcttcccgtcgatatataccttaaatccgctgcttccgcgaaaggtaacttcaccatccacatcgacccggacggagggagtattttccagaatatcgaccgccgttccgccgctgctcatgagattgttcgaagcgtctataatctttttgtccagcttgtagatgacttgccttttggctgcctgcaccactacttcggctatacctacctccaaaggttgcagttcgataatacctaagtccgtcactgattcggaagaggtgatactaatggcgccttgtgtgtagatgtcatagccgatcagtctcaccattaacgagtattctcctttggcaatacccgataagtggaagtcgccgctctctttagtatgggtaaatgaagcgggatcggtttcgcctttcttcgttagtacgacatcggcaaactctatcgggttgcctgtacctttttcctgtacttttcctttgatctgtacgggaaccgccatgaggcagttgaaactaaacataaaaagaatgagaataattgtagttttcatgatcgtgttgatagtttgttttatgccgcaaagttaatgaagtatttctaacatcaggaaaaatcggtttgctatatagcgcttgtgtcacggaaagatacaaatttgtcacggtgagacattttcttttttgatttactttgcagtgttgtcttaattctattttaaataatatcctcctgtttttggagcacctctaaattctattaaacctttttcatttaaagatttaagatagcgcattgttgtcctccaacttttagaaatactttcagctatttccgaagcatttaatccgggtttgatttttagtacacctataattgcttgctcattttcgtttactatgccatttactatgccatttactatgccatcgatggcatagttttttgcttggcgtttaaacacaaccgtaaaaatcccatctgtatgaaattctggttcaggaagtttagcttctttcattgcttcctgcatacgaggaataccggatgcaacccgttccaccaagtgcatacgggtaaataacccgaatattagcggattacgtgtcatacttttgtgcccgaaatctcttgcaacaatcggcaataaccctcccggattggaaacctctattctgtcatcaaacatctctattgtgatggttgctccctgctcgtagtagtcacggtgggagagagcatttatgatggcttctttaaaaacagttagaggaatttcccaaatttcctctctcggtccgggaccttctattttataggcaacttgaagtttactttcaagccatgccatcgcttgcaaatactgttgatatagtggaccaccgaatgacttatcatctatgatatatactttggtcgttcccttaaaaagaacacatcttgttattgcgtgaggaaatttccgttcgggttgcttcccaaagaacatggctgcaccgtttttggctattcctttatcagtaaacagctctaaattctcaaatatctgtttgttgtcagtggacggactgagctgagcttccattcggaaattttttattgcttgttcgtctgcatctgtataaatgttgaaccatgagcaggggatagcgtcaaagaatattttgttgcattcctgaaaaaagttgcgcatttcttcgacagtacgaagtttttgcgagttagcaccttcacgaacgaaaatagaacctgaaaagatataaggtttatctttacctgatggaacatcaatcacccaaagtgttttatctccaatgtttgcagcatacatttcacagtggagagccggagatatttcactgatagaaccttgaatagccgatcgtttgtcattctctaaagtagtgccaatcacttttccattatcatctaccccaattagtaagtgtcctccgtcagcattggcgaaagcgcaaatttcttctgtcaattcacgcacctttgagggaacacgaactttaaattctacattatagccttctccgctatcaatgagtgactgtaggttttctgtatcaagcataaataatcaattggattacaaagatatgattaatctgtcaagatgtagaatttatccttttgaaaaatgtaacaattcgttttggggagataggcattagctttgcatcttagcaattttatcctccaagtatttactctgcttttctgtttggtttccgcttaatgagtagaagccgttccatatcattgaatagttttgtgtcttttaattcaaacatgatccatttgccgtcgtggaaagtggtagctgcatcatagatcatctgtacctcgtttgaaaactgttcccgctgaatttcgaatttggcgcgttcatctttccccaagataaccataaatcccagagtcttttccttcgcatataatgcacagagggttttaccgcctttacggtatttgtattcatacgtccacgctttgccgccacggttccaaagttgctccatttcgtagctcttctcgatgcgctggcagagtgagttccatacattgtaaaggtctgttcctatcagattctctatatcttcggaagccggtatttgaaaagattctttcatggtatttgctgtttaatcagatctatttcgcaaagataggatgatctttctgtaaatcgtagtccaatataggcatctttggttataatcattcgaaatctattcaaatttaatcatgttggctaattgtaagaaatagtcgtttgaccatatctcaagtttttcagtattcttaataaaaggttctacatcctgttttaccatttttatatcagttgaagcaagacattccttttagtaagtggagacgtttttctttatgattttaataatattggtaatagtagatttttttttgccgactaatgcacattgctgaaagatgtttgtatccattttgaagaaggcatccatgtcaaaacgtaaattatcttctagataagtcaatatttctttttgaaatctcatattaagatttggtgtgttcacaattaaatcacataaagctttttccggttgggcaattagaaaagctgtattgtctttaatctcatgtctgataccgattgcaaaatactcttttgtacattgagtatattcaaattttccaagtgaatttttaaattctctcgaatgtttcgttgtcatcgattgtgtgatatacacgctttcgggaattaatccataataacgtaatgctgattccatagatatatatgacggaccatataagtgatttgctataagttccatagataatagtttcccgcttttcttaggcgaaaccacatacaaacctttcttgagtctgataagtataccggacttttccaattcactaattttgttatgtactgatttgtggtcaggatacatcgatttcaaaatagcaaaatcaacgggtatattaccaatctctgacaatgtattcatattctttaaattctgttttaatgcaaatatagtaaaatttagaatagataatactaaaatattcaattatctgttcgtaatttagctattattcattaattacaccataattatatgggttttctatctcagtagaagttcgaagaagttttattttcatcagcatttcaatctcttttttaattctcattgcactctttcaattatagcaatgagatttaaaattaagatgtaaagacatatttcatacttcactccaaatatagtctttaattttaatctatttgttgggaaaaataaaatgctctgaagggcgtttatgtgcattttacaaaaagttgtatatcagatggttatgaaatcttatttttggtttaaaaccaacgaggcgttccttttaaaccaacgcctcgtttctttaaaaccaagaggacatttctcggtgagaaatggagtattggttaaaagctagattcaaatccggagtgaacattcaaatatttcaaatacagtatttgttgatttaagtaaggtgatgtaactatttgttgtattcaagcaggaaaaaagataattgctttagcatgaagtaaataaattccaaagattttacttacatttgtttctataaataaaatgtaagtgaaaaacatgagaaaacaactatcagtatcactcctttgctgccttcttgtttcggctacgtcattagctcaaagctggaaatcttatgaacagactgcgaaggggaagacttacgaagcatccgattgtgtgacactgttggatagtacattggtatctgtccagcctacaggacaagggtcgtttgctgtatgcaaagtgataaaggtacagactccgaggggagcagtggataatcgggtgattaaatacgattatgaccctttgactgcttatgccgaatttaaacgtgtaaccatccatcgtgctaatggaaaagtagatgaacttgatgtcaggaaaacctgtgattatgctgctcctgcccgtgccatttattggggcgcaagacaaatcatgattgaagtgggcgccttgcagccgggtgatattgtggattacgaaatagccaagaaaggctttacctatgcgttgcttgcagccggtaatgaagatgaatcacgctttattccgcctatgcgcggacagttttatgatattgttcccttttggagcagcactcctactgtacgtaaagtttatgtagtaagtattccgatggagaaggaacttcagtttcagttctatcagggcgagtgcgcatcatccatgcgttatgaagacggtcgcaagaaatatagctttgcgatggatgatatgatgcctttcgttaaagagccaaacatggtagaccttttcgatgcagctcccaaactgatgatgtcttccactccccagtggaaagacaagtcgttgtggttcaataaagtgaatgaagattatggtagttttgatccattgcccgaagcacagaaaaaagtagatgaactgataaaaggcaagaagaccgaaatggaaaaaatagctgtgctgactcattgggtggcagataacatccgctattccggcatttcgatgggaaaaggagaaggatttacacttcataatactaaaatgaattatactgatcgttgcggagtctgcaaagatatagcaggtacactgatttcgttcttgcgcatggccggtttcgaagcctatcctgccatgacaatggcaggtagtcgggtagaaagtattcctgccgaccattttaatcattgtgtggcagtggtgaaactgagcaatggaacatatatgcctctcgatccgacatgggttcctttctgccgcgagttatggagcagtgccgaacagcagcagaactatctgccgggtgtacccgaaggttctgatttgtgtatcactccggtttcggctcccgaaaatcattatgtgcgaatcaaagccgacaaccgcttggaagcagatggtacactacgcggtacttttacccttacagccgaaggacagagtgacagcaatatccgtcgcatctttaccaccggctttcagagcgaatggaaaagcacgatggaacgtcagctgttggccatctctcccaaagccagattgttgagcgtagactatggaaaaaatcccaaagactatcaggctgcacctattaaaatcacttttcgttatgaaatacccgattatgccttgaaaggagagggcgagatgtttttccgtccgatggtgatgaataacctttataatcaggtacgttcttatatgtggatcgatacttcggtagaaaaccgtaagtatggtttcaaagatggttgttcccgtttggtcgaactggatgaaacgattcagcttccggcaggatacaagttggcgagtgccgccaaggatgaaaccatgcaaggagtgggagccgattttgaaggttcgttggtgcagaaaggaaataaagtgttgctccacaatagactggctttgaagaagcgtgtttatgaggcttctgattgggaaagtttccgcaatgctgtgaatgcccacaaggcgtatggtgaatatttggtgattaaaaagtagagcagaatgaaaaatacatattattatatagttacgctggcgatgctgattttggcatttccggtgaaagcggcatccgaagctgaatttgggaaattgagcaaggcttatacgttacacgctgacggtagtcaggaaatgcgtgtgcaaaaagagctgactttgtttactcatgcagcgatgaaccgtgtgtatggagagagttttatcatttacaatccggagtttcagacactgaagatccacgattcttatactcgtcagaaagacggtactattgtgaagactcccgaaaatgcgctccttgaggtgcttccttccgcagcggcagatgctccggcttataatggtctgaaagagatggtagtcgttcatacgggactggaattgggagctaccatttatctggactactccgtcgttactcgtccgggatatctgcccgaactggatgtgtgcgagcaggtggaagagctttccccaattagggaatatgtgttttcgctgtcagtgcccgaaagcaaacctctgcattatgaatggttgaatggaaaagctgctccggttgtaaaaactgcgggtggtatgaaaacagtgacctggacactgaaaaatgtgcagccgcgtccttattcacttgacgtctctttgccggcaggtaatgtacaggctgttgtggcgtccacttatgcttcaaaggctgatgcactgaaagtgataaaacaacaactggaaagtaatggaaaggatgtttccgaattggcacagaagctgactgccagtgcacaaaccacagaacaaaaaaaggagttactcactgcatatatagaaggattgggaaattgccgtctgaccctgtcgcaaaccggataccgtttgcgtccggcttccgaagtgatccgttcggcatacggaactgaggcggagaaggctgctttgttggctgccttgcaacaggcgataggcatccgtgcggagataaaagcggcttttcctaaaacagaagataaagatgcagccggacttgctgctgtcagcggattgtttctctttgataaagggattgccgatatacaggattttgtttctgtagttgatctgaatgctcagccgatagttttggagaaggtttctcatgttgtttcacgaactgacacattgcaggtgagcgataaaaccggaaaggcattggctgatggttatcggaaattcgacttaccgcaggctcgcggtggatgggcaagctatgacgggcgtgtgacggctctgaatacaactcgtcccgttaacctgcttttgcggtatttgcccgatgaggcttatacctatatcgtaaagattgatgcaagaataaaaccagtggttgtgccgactaacaaaaagattgaaaatgctgtcggtatcatggaagttacagtggaaaaggcggaggatgaaataaagataatccgtacattgaaactgaaaaaacaattgataacttcggctgaatatccggcgtattatcgcttgatggcggaatggatggacaccaatgacaacagcctgttgtttcaacctgcgaagtaaatctgataagcatattgttcggatggggctaccattctaaacaaatcaaagagaatgtgtcgaaactctcataaattaaaatcatcttcgctacaactatctgtggcgaggatgatttcgttaaaagggaagtcttgacacatcctcttcgtttcttatccggtaaggcagatgatcctctaaagaggttttatcggaatacaaatatccacaatgtgtttattctccggatgtgtccggtgactgttatgatataactcataagtacatccatctccttgctgatagccactttccgtaaaccacttgcacattgtgttccatgctttctcgaaatcttcagtacctaattcaaagtgtccgacagcatatttcccaccgggaatgacgagattaccgatttcaccttctccttttacgtctcctcccacgatgatacaagcactctgacgcactttactcaattccgttaccgaaggatcatcatgtgtgacggttgccgatttcgtaacattcggaatatacagaccacgaggttctgcccatttgataagtttctcatacgcttttacaatctctttaaatgctcccatatgccggcaataaacggctttcatatccggcatctcttttacttcgatttttgtttccataaaatatgatattttaaatttggcactgcaaagttggggagataatacatactttggtgtcaaattcttgctaaccatttgtccattcttgctaaataagattccgtcttgggcataaacgggtttctccattttacggaactggcttggcgtcaaaccgaaaaactttttaaatacacggctaaaaagggatactgtgcaaaaaccgcaactatcggcaatctcactgatagaaatatccatattttcccgtaaccggcaggctgctttctcaatccggaggcgttggatgtaatcaatcggtgtttcacctattagaaatgtgaatattctgtggaaatgaaaaggcgaaaagttagctatttctgctatacttttcagttccagaggctggtcgagatgtatgtcaatgtagtccatcacccgattgatcctggaacgatattctattttacttttttcttgtatattcatgtcagacggtttttaatcgcaaagatagctgccgtctgtcagatctgcttgtctattcttgctaactatcttgtgaattttatccttacactgtatttgcagaagtctttttatgtgtgaaagatggagtaaatatagcagtttttggcggattattcttgtttcatgaggtatctgtctatctttgcagtataaacggtttgtttaatttataacactgacgattatgaagttactggtttttcttgctaaaggctttgagacgattgaatttagtggtttcattgatgtgatgggatgggcgaaaacagattttggctgtgatgttgaggtggtaacaggtggttttaacgagaaagtcatcagttcttttaatattcccgttttggtggataagacgattgatgagatatctgttgatgaatatgatgctcttgccatccccggaggttttgaggttttcggcttttatgaagaggcttatgaggagaaacttttaaatctgattcgtcagtttgatgcccggaagaaatggattgcaacagtttgtgtaggtgctttgcctgtcggtaaaagtggtgtgctgaaagatagaaaggcgactacttatcatctcggaggagcagtcaagcaaaaggttcttcaaagtttcggagcaataatcgtcaatgaaccgatagtggtggacgacaatataatcacttcttatggtcctcaaaccgcttcgggagtagcccttcttttattggagaaactgacttcccatcgtgaaatgtctttggtaaaagaggctatgggattctaaaaataaaaccggagaagcatcaaaattagtacggaaggattattgacttatgatacaatgactcaatctgctgcaataacagagataagaaaatattaatcttcttatctctgtcctctactatatcatatagcaaacaggctgctaaatcagttcgtgaatttcctgaatatggagattcagatgatctaaatatccttctatcatttcttttaaagtgacttttgtcccttcgaagtcacaccagtaactatctagctttgtttgatctgccgactttattacctgaatgatatgcagattaaagaatttccataactgaatcagattattccagtccgtatgctgataatcctgcaaggctatccacagatcattatcctgtcgataatcaggaaagaaaagcaggttcttactgtattgcaacctgatcatccgttgatgattgtttgaggcggaatcaatcaaatgtccgagaatttgtttgatagtacgattctgcctgttacgtttttgtgtgattgtctcttccgacaggctggttaatactttttcttctgtctctataacattataaatcccttctgttattggggaaaaatcaaactctggcataattcctctctttctgttttaaagtttcttttgcgcaactgcgcaataatgcaaatatagacaaatgaatgaaatatatgcggaattgcattctataaaagcaaacttgtttgttattctgcttgttaggataacatcttttccatatatcctttatatttgcatgatattagaaccaacaattatataaaaaagatatgagaacagtattggcagcattaggagttttgtgtttcatgggaagttgctcgtctggtatgacaagttcaaaaggcattgtttgtgatgcgaccatgaatacagtggcgattgttacagacaagaatgatactctttcattcagtacgatgaacgcgaataaagaagaagtcgatggcttgcttctgaatgatactctggaagtattctataccggtaaatatacaccggggatgcaggcctcaaaattagtccagtatccgcaatctctcaaacttggaggcgatcgggatgaacacggttgtatcggctctgccggatatgtatggtgtgaagtgcagcaagactgcatccggttgtttgaaaaaggtatccggacggaggctgttgatggaagcactgcttctgcttttattgtgttcagtcccgattccacacgtttggaacttttcttctctgatgaacaaccgaatgagattttggaaagacgtggcttaccttcgggaggttatgcatggaacgtggaggatgatgatacgaaaaatgtacggtttatagacggattgtggacaatcagtcagagagataaggttatttatcgtgagaaaaagacgaaagccggagaataattccggcttttatagctgtttatttattacttttatctgataaaagtatagccgaatcgtgctcaacaatgtctttttacgactgtagtgctaaaaaatgtgataatctaatagtaatgaaataaaaaaaggagggatactgtaacttttaattctgatttttattatatttgtatagccgttgaaaggtgcgttcattgagactaaatatcgaaaagcgttcagcttttttacgtagtaacgaaactaccaatttcttttaccctcagggtaaatattacaacacgtaaaaatgactgaacgcctacgcttgttatacatatactttgcgtgggcgttcttctcatttgtgttgtagggattggtagttcctgttgctacatttgggaagaaaaggctcacgttttttatatctattcttgacataacattcaaaacatatgaaaagatcttcattttgggttttatcgtaaaagtgcgttgcttttttaacgagttagttttcctttttattaatttaaaaaaagactactatggataagaaaatcgtaggtgccaacgcaggcaaagtatggcacgcccttaatgaagctgatggaatatcgattcccgaacttgcccggaaagtaaatctgagtgtggaaagcacagctctggcagtcggttggctggctcgtgaaaacaaggtagtgattgaacgcaagaatggattaattgaaatttataatgaaggtcattttgacttttctttcggataagtttaatgaatataatgctggttaggttatataatgaaagaagctctcgataaaaaactgaattcagtgatattgaaagcttctttttattatataccttgtgtcaaaatgccttattgaagagtaactataatggagtgttcgcccttctctgttatgataattaccttatttctttgtcagaaacttcttgctcaaccactttcttacaggctcgtcatacagtttcaggcaaaggtaagccaacacaatgcttccgaagaagacacataaggctaccggccatgactgggagaaagtgatatgtggctctttgctccataaccaggcatagaacagatacatgaaaggataatgtatgatatataccggataagatatatctcccaggaatttacagattttggctgtacctttatccgtcgtttttcccgaagcacccagatagacaagtagcgggaaaataagaatggtgcatatagcatcgtaaataccgttcatccactgcgaagtatgaccgccaacgtacggcatggaaagtaaaacgagagttgccacgctgcatatccagaaagcccctttgatgtggacaggtttaaagatgcgtgacatcaataatccgatagagaatgcgaacagcatacgtagaaaacctccgatcaggttatagtcgatcatcgaccagcctactcccagatgatagttgccggaaagattgaatatcgagaaggaagccaatccgattcctgctatcacaacgagtatcgtaagtgctttggtagacagtcggcgaataaatagggcatacaaaatattaccgatatactcgaagaacaaagaccagctgggaccattcaaaggatacatctcgccgtttccacggacttcgggacccgtgcccggaacagccggaatcaggaaaagattgagaagcatagccaccattaccatcgatatggaaacacgggtaccgtcccattgctcgcagccttgtatgcaaaatgtaatagcacccaaaacggctcccataacaaccatcggatgcagacggattaatctgcgtttgaaaaactctttttgggtcatcgttgttttccagcggtcgtcataagcatagccgataacgaaacccgacagaataaagaagaaatcgacagccagatacccatgattgaatttttggtctatgggacttgtggcaaagccttcgaatacatgataccatatcaccaaaagagccgcaacccctcgcagtccgtcaaggagtacgtaatggggtttagagtctgcaaatgcagaggaagagattttttgcatgttttaaattattgttcaaattagtattagtcattgaagaagccgcaaaaatacggaatttataagtttaaaaaattgtcctgcatcaaaatcttgccgtatatgggaattatttgtatgctctgaggcggctgagtgttgaaagtgtgatgcccagataagaggcgatatatcccaattgtatccgctggcacatttgaggaaactgaagtttgaatgcttcatatctttcttttgcagacagggtgaggcggtctttgtgcgaacggtgcaggcgtctgtattcgttttgatgaatcactcttccccagtttgccagttcgatattggtctgaaacagccggagcagatcggtcagtgatattctgtatgcgacaacgtcctcaagcgtttccacaaattcttcactcatcttattataatacaattcatccatgctgaagacaatcgctccctcgcacgcaaaagaagtcgttatttcctctccgtttaccagccagaaagagcgggtcattccttcttcaataaaataagccgatttgcaaaatttgttagcctctatcagttgatgtctctttggaaaatgacataatactgtattttcttttagtatttgtatcgtttcatccgaaatgggatacaaagagttcatcttatcaataatgtttctcataaagtagccttaataattttctgtcaagtgcaaaaataggaaaaacaattctgcccacaatagatgccggtgaaaaagggggtgttttatcgattcgttcactaaggaggagagaaacaggagagtgggaactgctgctgaaagacaaagaaggtacacttcattctttggtgaaatgtaccttctttgatatcgggaagaggctaaacacgtgagtatagccagcttattccggaaacggtatacatcaattgacgttgcttaccttggattctgctgtatattcggattggcatctatctcgctttgcggaataggcagtgctattctcagatcggtagcttctatcttttgtgcgttagacgctttcaaggtctcaagatgccagctgcccttgcgttcaatagccagatcattgcgcaagtagtcatagaagacttccccttcgccaaccagttccttgcggcgctctttaagaatcctgtccagagtaaaagtctccgttgatacttgctgactggtatccgtggtacggcggctgatgatgtcattcagataaccttgtgcttcttcaagatccgttccttttttcagtcccgcttcagccgcgttcagatagacttcggaaaggcggatgatgcaaatgttattagttttgggatcatctccggtcttgccggggaacttggcaagatagactttctcgtgcatggcggcagccggaagtccggtgttgttttcgatgacagattcctttgtcaggcagtggcgtacatccttggagtcttcattcagcaggttcaggaaatcttccgacaagatcagattattccagtcgaccgttgcttcgttggcataaaccatcggagcgccttcaccgcccgtacctcctgaaggttcggataaagtgatgtaaagttcgaataatgattccgactggaaatcctgcccccatacattgggatattcctcatagctgtaaagctgataacgtccgccgttgtttttgatcacatccgtagcggcatcataagccttctgatattcacccatattcagatagactcttgacagtaatgcctgagctgcccagtagtttatatagccattggatgtctcttgtttcaacccggacagtgcattgctcatgtcgctgactacctgttcgtagcattgcgctacagtgctgcgtgacggtttatgcgtgggatcggaaggggaggtctcgatgggtactcccaatgaagcccccttgtcattcgtataaggcattccgaacaaccgggtcaggttgaagagggaaagcccccgcatcaccagcgcttcggacttgatgcggttcaattctttagtatcactgctttgaatactgcccgactctattttctgtatcagattattcgtctgtcgtattactttataaacagtattccatggcagtacaatattcagattatcggaagcgagcacattgtattcataatagggagatacgcgttttccgtctcctttggtgatacgtgcctgtacatcggcggcacggcaatcgccgtaataccaatagttgtctccgtagtagctatggccggatgccagacgataaattccgttcagagcgatttgggcatcgtccaatgtgacgatggcctgtcctgtttctaccgagctggtggtgttaaggtctagccagtctgccgagcaggagctgttcagtagagccattgctgtaagtatgtatatatgaattcgtttcattatgttgtttatttagttagaatgatagggatgttagaatgataattgagctccgaaactgaaagtacgcatggcgggagcctcgcaaaagacttcaccgttaacgggtgtttcggggtcatactgtttccatttggcccaggtcagcagattgtttcccgagaaatatattcgtactttgtcaatcatcagcttttgagtccactggttgggcagtgtgaagccgagggtaaagtttttcaggcgtaaatgatcggtgctgtggatatagcgggacgagttggtggaagtagccggttcaccatatacgaaacgtgggatatccgtctgatctccgggcttttgccaacggttcatcatgtatgcgggcaagttgtatcgtgaactgtagatggagctgctgccgttttcaatataagtccccagtttgtcgaacgagtaaccgcccagtgaataagtcagtgtaaaggtcaggtctatccatttgtaattcagaatattggtgaatcctcccgatactttgggagtagcggttttgtacggaatggattctgctttggcagcatcggtggtgagttcccgattgtagcttccgtcttcattttttgtattcagataatattgggcagaaccggtcagcgggtctactccggcaaactcttttacataaaacgtatgataggggaggcccactttatggatgaaccatgttccctcaatcgtctggtctaatagtccgttgagtgaaacgatcttattccggttatggctcaggttgaaaacactggtccagttaaagtcgttggaaactacgttcagtgtacgcaattcaaactctactcccttgttgttcaggcgtccgatgttgcttaaataactggtaaatccggtagtgggaattatttttagagactatatgggtaatataaacacaatactttctgtagatgatcaattagtgaaagatattaaaaaagaagctgaggactcacttgctgaaacaatgtgggaaggttatgccaatgatatcattacggggatacagaataataatgggattgaaccagatcgtgctatatgggaattagtccaaaatgctcgtgatgtctcaaaagaagattgtaatacagagatagtatttactcgtagaaaaggaagctttgaatttcggcataatggccagccattcacacgcaagtcgatccaagctcttattttacaaacaagttcaaaggtgcgtcatgatattgtgcaggtaggacaatatggaacaggatttcttacaacgcataagtttggacttagatacaaactatcaggggcacttcaattactaggaagtgataaatattataatttttcgtctgacgatttgttgattgatcgttcaagtaaagacaaaattgaacttagtaggatgcttggtaagcaaataaatactacacaggcttggggtgaagatattcataaacttgtttccaccccatttccctttactgtttttacttatctgcatgattactctgtggaatatgaaaatgtagaaaaggcctttcatacttctccagctttgacttcatatgtgcttgctttgaataagtatgtgggatcaataactttccgtgatgagattaacaactccgaggaggcattttgtttcatcagtagcgaaaaggatagcgaatatggtaattgtattgtaaattgcgtaaacatcgctcataagaagactaatcaacaagatgatattatttcggtctacttattgcaaagtaaaacagacttggagcaaaagacaggtgaaagtatgataacggtgatcctgccaataagaagacataagaatggaattacagaagttattagttttaatgacgaacttcctcaactatttttatatttaccgttacttggctcaaaaaagtggggacttaactttcttatacattctcctcattttacttgtgacaaagacacgcgagacactctattatttataggtaatggacaaaataatgaagaccaagtagcaattaacagaaaattaatcaatcttgcaagtagagttattcgtgaatatcttaaccaaaactatataacttttgaaaatgtgaaatatttggctaaagttaaatttggtttgtcacagtcgaatgagaaattagtagagtactaccaaactttacaggatgaatgggtacagtactttgagtctctttgtttagtaactaaaaaaactgatgaacgtaaaaatataacggtaaatagtattcgagtacttgatgaagaaatgtataaagcctgtgagcaagacaaagatttacttgatgctgtttatactttactttcaaagacacaatatgcttttattttaccagataaagatgatattatttactggagtcgaataactaatgaatggtatgttggaaaggaaaataaacatgctattagacttgatgatatagttgaacttattcagaatacaacaattactaccattgacttaatttggttacataaactatgtagctattttaagaataacaatcacgaagttttctttcaaagaagaattgtacctaatgaagcgttagaactgaaagaccgtaaatctttagtgaaaccagttgaattcaatgagacatttcggagtgtgatgaaggtgttaattcctgatgaagttaatacttttgtacatgtagactttttggatgtggtggataacgaagtcaatctgtttggtgctgaggaagcaaaagtttcactgacaaagtacatcacaagtctagcacctaagagtgatgtgttaaagaatactatcattgcagctcaagaaatagatccggaatactacaaaaattgctgtattcctacagataacgtgcatgccatacttgatctttataagatgttgttgtctgagagtgctagtggctttacggcgaagatctatgcattactatcggaatattatgaatattatccaactactaatgatcgcttaagtaaggaagaattcgatatccgcaactgttataatccgcttataaatgattcattactacgtttttcattaactgaggataaattatcaaaaactaattggtgttataagatggtagtagagttgaagatgttctcagaagcaaataattttctccgcaattatcaagtttatcctgatcaaaaaggaacatttaaatatgctcaacaattaaagaaagaagagaatggcattccgaagcgtctgaaagaaatatatgacataatatgtaggaatgtaacccatatagatgactcaaagagtatattacatgaattagtagctacagaatacgctccttattttattggagagtctgaactgaaaggtaaagaattatctggagaaatagaaagaccatttgaggacaacaaagtgatatcaattgaaaatcatccacattcagaacagctgcttgaaattattgaatacattagtgatggagaaattggaaaaatatggaaatcgtattttccaacaataagtccaataagggccaatcttatgctttctgtggttacaagtcccacaaagaaagatagtattttcaagcttgtccgcttaaaagatgaagaaagacttaaaacaatagctaatctttcagaaagagaagatatagaagaactagtagagcttggtgaaatagcattggaagaaaaaaaacagaaggcctatatcaaaatgttgggtgattatgtggaaactcatatacaatgttatctcactaaagcattggaagatataggtgttaaagtgataaaccaacaaggtgggcaagactttattttgagtaaagaaggatataaggactatcgtatagaggtaaaatctcgatgggcaacggaagaatccattgaaatgtcaagcctacagtttactactgccgttgaaaatgctgacaatttcacacttattacagtcaatatgactcattttgaccgtgaaagagtagaaaggaacgaatttattgagctttcggaaatgaactcactaattcacgtagttgacaatattggacatcttgagcatgatctaaaaaaacgtgtcaccgaagcgttcaggggtgagcaaaatgaaataagagtgagtggctcatattctgtaattgttccacaaatagttgtaaagtattattcaaagagatttacagatttgattgcgaaattgaaaatgaattttatataaggtaagtaatgtattattaaacatcaaatggtataccaaaatagaaaatgtacctttatgtgtaatattatttctttttaatggatattaaatagaatatatctgacaaaaagtcaggttgcttatatcaaaacagaaaatatgtaaactttttgttaaaaaatatcagaagaattattgaataccacaaggagaatgattcagaaaacgactgatgcggatttaacaatgccaatctgctaagtcgcagattggcacattaaagtccaaccagtcattatacacaatcattggtacaataaagtatatagttgcgaaaatcaatctacgaatatgaatctaaactaaatgagcttctttctttagaaaagaatgaagtgatttgatagaactaaacacatatccttgattttccttttctaatttcttcatttttgagagtgatgctatccatgcagcagataggcattgtattccagctttactacaagcggtaatatcggaaaattcatctccaacatataccatttctgctggttggatattatattttgacattagttccgtcattgattccgcttttgtgtttctatctggcgatccgattgaaatactatcaaaaagagcttccatttcaaaatggtgaagcgtaatatcacaacttctttgacctttacctgttattaaagatacaataattgagttcttcttcaattctgttatcaattctcttatccccacaaatggttgaatgtggactgtgtgcatttctttgtatatcacataaaaatcaatcagagctttttcccaatcttctgaaacgacctctttaatcattccctcttcattaagtccgaatgttttcacaatatcatcttctgacaatatttttgaagcatagggagatactgtctgcttaaaggcttcgatacacattgggattgtatcggcaattgtaccatccaaatcaaaagcgaccaattttatcatagtttcttagtttgattgatttgacgtatcactttacatggatttccaacagctaaactatttgccggaatatcttttgtaacaacactacctgctccaattacactaccgtacccaattgttattccggaaaggattattacacctccaccaatccagcatccgtcctcaattgtaataggcaaagcgtaagtgcggcgaactcgctttattccatcttctgtttcaacaggcgctagccgttcatctaaatcaatagggtgagttgctgtataaagctgaacattaggggcaataagaacattacttccgatagtgattttattacaatccacaaaggtacaaccggtatttacagtaacattatcccctatatgtatattgcagccataatcacaaataaatggactggcaaccgagactttcattccgatactacctagcatcttttttagcaagctgtgtttctcttttttatcctcataaggtaatgaattatatttcatcaataacttatgtgttcgggtctttaaatccaagaaaacttggttgtggcaatcataccattcaccagccagacatttttccatttctgttttcataattgttacgtttataagattgaaactatttcggttatatcttttctgcttcttcctgaataacgttgttttgatggttctaaaaagttcataagtaatctaattttgatttgtggcaaagttatacctattttatttcaaatataggtatatgttttcgttgtattggtataattctgctttatgtgttatatttggagtatgaaaaaagaaaatcttcatcaaccatttgagatcagctttaacgagcataatgaatcgttattaactgagcatgagcatactttttttgaactagtctacatcttaacaggaacaggtattcaatggattaacaataatatgttcccatatcatgatggacacttgttcttgataactccaaatgattctcattcctttgagattcacacaactacaaaattcattaacatcaagtttaatgacatctatatacattcagccatatttggttcagagaatatccagagattagaatttattttgcaacatgcaaatcatcaaccgggttgcatccttagaaataaggtggataagttattagtgaaaccaatgattgaagcaattattcgggagtatgtaaataggaatctgtacagtaaagagattatcacgcagttgataaatactataattattgtcgtggcaagaaatatagctatgtttttacctcaacaggtcgatgaatgttcagatgataagtctctcgatattcttcaatatatccaagcaaatatctatcaaacaggtaaaattagagcaaaagagatcagtcagcacttcggtatatctgaaagttacttaggacgttatataaaaaagcacactaacgaaacaatgcagcaatacatattaagctataaactaaaattggtcgaaagcagattgctgcatagtcaaatgagaataaatgagattgccgaagaactaggatttactgatgaaagccatttgagtaaattctttaagaaatacaagggatgtagtccttcaagtttcagaaaaagtaaaaatatacttgaaacagatgtttcttgctatctgccaaaaaaagaaatccctgataatgtttgattatcagggattttcttaaattactcttttgattttcagtgatccagctggggctcgaacccaggaccccaacattaaaagtgttgtgctctacctgctgagctactgaatcaatccttatttgcgaatcagttatttcctgattgcgggtgcaaaggtagttacttttatttaatttgcaagtgtttcgtagaaaaaagttccaattatttttcctctttatcgcttgtttcttgattatcagtagtttctacttcatcatattttattctttctttgttgataataaagcgttgatagtaggaaagcattaaagtggtcagaggcaaggcaatgatcatgcccagcattcccattaatgaaccccatatagaaagggataaaaggatgatggcaggattcagccccgtaatctttcccatgattttggggacgaggaaagtatcctgtataatttggacgatggcgaagactgccagtgcgcatgcaatgataatccagaaattctctcccgtatcggcagctttaaggatcgccaataggaccgtagggaggaaaccgatgatttgcaggtaaggaaccatattaagcgctccaatgaaaagccccagagcgatagccatcggaaaatcgataataaggaagcctatactgaacagaatccccacacaaaaggcaaccagtgcctgaccgcggaaatatcggttcatgccgtcctgcacatcatgtacgaggttggatgcgaaggtacgatacttgttgggcagcagatgcagccatccttcggctatgacttcataatccagcaatataaagattacatataataatatgataaaggaggcgagaatgctgaacaggatattgagcgactccgcaagcagggcccacactctgggcaccgtatctttgatggctgcaagaatattctcttcgcttagtatacggttgagtgcctgaagatcgatattctcatgaatgaattcggaaagattcttgggcacattattcccggctccattggtgaggtaggttaccagtaagtcattcatcctgcctatttccgaaaccatgggaggcaccaacaaataaaataaggatactccgacaagagtaatcagaaacaaggcgcagaagatagaaacaatacggctctttaaccgtagcttatactggaaaaacttgactaacggataaaccatgtaggcaatcagccaggctataaagaaaggtaataacactccgctgagccgttctacaagcattagtatccctaccaccagtacacatccgatggaaccacgtataaaactgtcgaatgttatcttctttctttccatatatgttttaatatagagtttatatcttctgtccgtcctctccccgtgcacggaggtagcactccctgcaaagcggctcgtattcggctgtttctcctagaagtacctgcttgtcattcttgacggtacgatgagagaaagatgccagatcaccgcacttcacgcagatagcatgaaccttggagacctcgtcggcaatggcacataattgaggcatcggtccgaagggattccctttgaagtccatatccagtccggcgatgatgacacggatgccgttattggcaagctgtctgcatacgtcaatcagtccgtcatcaaagaactgtgcttcgtcgatgccgactacatctatttcagaagtgaacaacaggatgcttgccgatgaatcgataggggtggacgcgatggaatgactgtcgtgtgataccacgtcttcttccgaataacgggtgtcgatggccggtttgaatatctctacacgctggcgtgcgaacttggctctcttcattctgcgaatcaattcttccgtctttccggagaacattgaaccgcagattacctctattctacctcttcttctggtctcttgtatgtggtcttctgaaaataataccatgtgattttcgtgctttcttgattaaataaatgaatggacaaaggtaaacaattcgatgtacaagaactgttaaattatccattattttaagttattgcataaattattcctacattcgcaccataataacaatggatggaaatgaaacagaagctattaacagatattgagctggatgttcatgagctgaagctactcatgaatacgttttctaaagagccgactcagactttgtctgaactgttgaagcggagcatcctacgtatgcaggagcgtttggaacagttgtcggaagagataagtgctgtgccggtggaagcctcgtcttctcctgtagcggaagcggaaatagaagcccccattgttgaagaacaagcccctgtaatagaggaaatcgaatatccggtgataggagaaccggtcgtggaagagaatgaagcgacagcatcgggagaagatgaacctgtgatagtacaggaaacgcagactgctgtggaagaaactgtaatggaggaacctgttgtcgaagacgaaatggaagagaaagaagcggaagatgagtcggaagacgacgaatcgcttctgatagaggagccgaaagctgccgtattgggcgaaagcataaagatggctgccggattacgtcattccatcagcctgaatgattctttccgtttctcacgtgagatattcggcggagaccccgaactgatgaatcgtgttatcgagcagatatcagtcatgagttcttataagactgccgtggcatttcttgcctcgaaagtcagcgtaaacgaagagaatgaggcgatggccgactttctggagttgctaaaaaagtattttaatcaatcagcataaaagtttatgggaaagttatatgtagtacctacaccggtaggaaatctggaggacatgacctttcgggcaatcaaggtgctgaaagaggtcgatctgattttggcagaggatacacgtacttccggtattttgctgaaacactttgaaataaagaatgcaatgcaatctcaccacaaatttaatgaacataaaacggtggaaagtgttgttaatagaataaaggcaggtgaaaccgtggcattgatttcggatgccggaacacccgggatttctgatccgggatttttggtagtccgcgaatgtgtgcgcaacggtatcgaagtgcaatgtttgccgggagcgacagcttttgttccggcattggtagcatcgggactgccgaatgaaaagttctgtttcgaagggttcctccctcagaagaaaggacgacagacacgactgaaggcattggcagaagaacatcgtactatggtgttttatgaatcgcctcaccgcttgttgaaaacgttgacacagtttgccgaatatttcggcactgaacgtcaggcaaccgtgtctcgcgaaatttccaaacttcacgaagaaaccgttcggggaagtttggcggaattgatagaacactttaccgctaccgagccccggggcgagattgtgatagtattagcaggaatagacgattaaaataacttcatttaaaaacgtaaaacgtaaacgtatgaaaaagttagcagttttatttatgtgcgcagccatgttggcttcgtgtgactttaaaggtggaagcaaagaccttaaggctgaaaatgactctcttttaatggaattgacacagcgtaacgctgaattggatgatatgatgggaactttcaatgaagtgcaggaaggattccgtaagatcaatgctgccgaaagccgtgtggacttgcagcgtggtactattaccgaaaattcagccagtgccaagcaacagattgcttctgacattgaattcatctccaagcaaatggaagaaaacaaagctcagattgcaaaactggaagctcagctgaaaaacagcaagtacaactctactcagatgaagaaagctgtagaagctctgactgctgaattgaaagctaaacaacaacgtatcgaagaacttcagactgaactggcatctaagaacattcgtatccaggaactggatgcagctgtcagcgacctgtctgctgccaaagaatctttggctgccgagaacgaagcgaaagctaaaaccgttgccgaacaggataagagtctgaatgccgcatggttcgtattcggaacaaaatcagagttgaaagcccagaagattcttcagagcggtgacgtgctgaagagcgctgatttcaacaaggattattttactcagatcgatatccgtacaacaaaagaaatcaagttgtactccaaacgtgctgagttgttgactactcatccgacaggttcttatgaactggtgaaagatgacaaaggtcagctgactttgaaaattactaatcctgccgaattctggagcgtatccagatacttggttattcaggtaaaataaggtagacatacctggttagaattgccaatgtgctgattcctgaattcaagaaattagcacattggcttttttatttctcatattatatatatcacggagccaatgaaatataaaaatctcttttttgacctggatgacaccatctgggctttctcacgaaatgcacgcgacacctttgaagaagtatatcagaaatattcatttgaccgctattttgactcgttcgatcattattacacactgtatcaacgacgcaataccgaactctggcttgaatatggagagggaaaggtgacgaaggaggaactgaaccgccagcgtttcttttatcccttacaggcagtaggagtggaggatgaggctttggctgagcgtttctcggaagatttctttgccattattcctaccaaaagcggtctgatgccccatgccaaagaagtgttggagtatcttgcgccgcaatataatttgtatatcctttccaatggtttccgggagctgcagtcgcgtaagatgcgttcggcaggagtagatcgttattttaagaagatcattctttcggaggaccttggcgtattaaagccttggcccgaaatctttcattttgctttatctgccacccagtctgagttacgcgaatcgttaatgatcggtgacagttgggaagccgatattaccggagcgcatggggtagggatgcatcaggctttctatgatgtgacggaacgaaccgcttttccttttcagcctacctatcatatccattcactgaaagaattaatgaatttattgtaggttttatggattaagtcgtatttttgttgcatctaataaatgtataaaatacgataacatcatggatagtacgcttctgccatttgctttactttgttttacttcgttctttacgctgaccaatcctttggggacaatgccggtctttctgaccatgacacacggaatgacagataaggagcggcagactattgtgcgccgtgccaccatcgtgtcgtttataacgttgatggtgtttgtctttgccgggcagttccttttcaaattcttcggtatctctaccaatggtttccgtattgccggtggagtaattatctttaagattggttttgatatgcttcaggcacggtatactccgatgaaacttaaagacgaagagattaaaacctatgccgatgacatctccattactcctcttggaattccgatgttgtgtggtcccggggctatcgctaacgccatcgttttgatgcaggactctcatacttacgccatgaaaggtatattgatcggaacaatcgctttgatttatctgttgacgttcttcattctccgtgcttccacccgactggtgaaagtactgggagagaccggaaataatgtgatgatgcgtttgatgggattgattctgatggtaattgcagtggaatgctttgtgagtggagcgaagccgatattggcggatattgtgagagaagggctgagcggtatctgcaagtagaagtctgtattgtggggaggaacggataagattacactcatgtgtaaattcggaaatggaaaataaaaagcgagcccgtttaactttaagcagttaaacgggcttgttattaaaatggtttcagtgtattagtagccttcgttttgtttcagcttaccgttagatacattgatctcggaaaccggaataggcattacggtacgatagtcgtcatagttgatcggaccggccggaacctgggcattcgttactgcctttttgtttctccatgtatcccaggcgttatgaccttcaccataaagttccagtctgcgttctgtcagaatatcatcgatagtaacagaagcaacgtcttcatagtcggctattctttgcttacgcaagtcattgatatagctggcaggatcagcaccacctgcttttaatgcagcttctgcggcgatcagatatacttcggacaggcggattactttcggattatttacatatatttctccgtcgcgtcccggatacttctggatataccagccttcgttatctccaccgtcgctttcttcagcaatcagagtgctgcgaacatcttccggacgttcttgaaggaaatttttgaatccctcggtgataccggcttcagcataaccttcggcatgtgtgtagaatccgagagagttacgttgtgcattgtagagtgaggtaatcaggaactcgaaaatgctttcactgcttccaactttggtccatactgtttcgtattcatctttggtgtacagcttgtatggagatttttcgattacatatttggcgtcctcaagtgctttactgttctcattcatgtagagatatgcacgggctctcagtgcacgggctccccaatagtcgatatgaccggcagttactaccttgctggtttctgggagattatccaatgcagtcttcaagtcatccagaatggtttcgtaagttttcgcaatagtagctctttctgctgtatatccggattcgaaaacttctgtagacaatacgatacctggatcgctggcctgtgcattacaaggaagtttagcgaacaagcgggccaagtcaaagtggaaaagtgcccgcaaagcatacaattcgcctacctgaacatcaacttcagctccttccagaccggatttcttaactccctccaaaactttgtttattcttgccagagaaagataaaagcgtttgtagaaatagtatgaatcagaactgttcttagtagcctggtaggcatatacatcaactgtttgcttattgctaccgatggctttgaagtcgctgcctctttggtcggcgtacaagaagaaatcacctgcgtagctgccacgtggattagttcccgcgtctatagaagaagtctgagactcataaacaccgttaactgcaaactgtaaatcttcaagagtcttaatagcaccttctgaaggccattcactggaaggcactttgtcgaaagtatcgcatgaggatactgccaacgtcagtaatagaatgggtaaatatatttttttcattattcagtctgtttatagattataatttgatattaatgccgaatacacagcttctcaatgccggtgtatctgcctgacgataaccattgatcgctacatccgggtcaatgtttttagtcttcgaccacaacatagccagattgtttgctctgaagtagatgcggaagttggaaatgtgcttcttcaataccggcagagtatatcctactgtcatttctctcagacgaatattgtcagtcgatttgattgtgcggcttgagaatctgtcccaacgataagggttagcgtagataggcatcgggttgtctactttatcacccggatttttccagtagtttccggctacatcttctgacaggttcatggaaccgattcttacgccatcatgatgagagaaatatcccggataatcgaacatgtcaccaccaaactgataagtgatcaggaatgacaggtcaaagtctttgtatgtgaaagtgttgctgaatccaccgataacatcaggcaatgcttttcctacaattcccttacctgcttcggagtagtcatttaccactccctttgagtgatcttcaggatctaaccagaattctcccagacctgtttcaggatttacacctttccattcgggcagatagaatgtatacattgactctccctcacggtgcagatacatttctccgtctccatactggatatcttttccttcaggaagtttgtctaccaatgcacgttggtaagtcaggttgaagtttgaagtccatgtaaagttcttgttgctgatatttttagaattgagttccaattcgaaaccgtcgttcttcaatgcacccagattttcccaacgggagtcaaagccggtgattaatgaagtaggtacttcgaacagcaaatccgtagtcttcttattgtaatattccagagacagatttacgcggtcgtacatattccattcaattcccatattgaagttcttggatttttcccagcttaatttgtcgtttgccattcttgaccagtaaatagcaggagcacttccgtatccggaacctgtatacaggtccatgtaaccatagtaatctgagggcaagttaccgtttgtaccataagatgctttgatcttgaagtcggtaaataacggcatatcttgcataaatccttctttactcattctccatgcaccggatacagaccagaaactagcccaacgattgtcttcactcaaacgtgacgaaccatcacgacggaaactggcagaaagataatacttgttatcatagttataattgccacttgcgaaatatgacatcatgccggctcccaaggttgaacttgcagcttggtccggttgtccgttggccaattcgggatagtggcttgaataacgtttggcaacagttacaatctgtagcaggtctctgttttcaacttcgaaaccggccatcaagttcagattgtgcatatctttaaaagtatccgtgtagtttaatgtagaagagctggtagctacgcggctttcgaaggtataacgagaacccattccgctgacggaaccaccgttaacactgttgcgatcccaatattcaaagtgcttgttgtctacatagtcataaccaaagatagagttaagtgataacttatcacagaatttgattgttacatctgcattggtcatgctacggaacattttggtctgaatccactccagagctgtatcgctgtctttaccacctagcatcagatgcgggttggtaactttaccccatgctgcatttttattatatgaaccatcttcattctttaccggagcagtcgggtccattgcgaataaaatacctatcggagaagaagtacccattccttgagcctggtctccctgatcgcggaaaccatcttgcgatgtagcggctatcatttgcttgagagctacgttcagccagttatttactttgtgattaacgttcagacgaccggagatacgttcgaagtcactaccaagaacgataccctcgctcttattgtaaccaactccggcatagaactgagtctttgacgaaccgccgttgatagatatctggtgatcttgagtgaaagcagtacgatagatttctttcttccagttcgtatttactttaccggatgggtcatggataaagtcagcaacagtagccggtgagtcgagcagaggaatgaacatatcacctccgttatcgatgttgttcaatgctgcttgtttgctatctgttattccgtaagtaaccagacagttggctaatgattcgcgagtgtagtcaatcaagtcggctgatcccatcatattgaaagcatttacagccatcttgttccagcctacttcacctgaatagctgacattcgtttttccttctttacctttctttgtggtaatgatgataacaccgtttgcggcacgtgaaccgtacaatgaagcagcagcggcatctttcagaacagtcatgctctcaatgtcttcaggattcagtgtactcaatacgctttgagtcttaccgtagtagttcatgtcgtcatcagcctttgttacgacaccgtcaataacatacaacgggcttttagaagcactgatagaaccgacaccgcgaatgttgatttcggccatagatcctgggtcaccagttgctgaggctgtgcgcacacctgccattttaccggacaatgccttgtcaaaagattctttggaaccggaaacgattttatctgccttaatgacagcagctgatcctgtgaatgaagacttcttcgcagtaccataagccacaacaataacctcatcaagattttgtgcatctgatttcagtgtaactttcaccattggcttgattgccacttcttgtgtttgcataccaatatacgaaatctgcaaagtctttgcagaactaatggatttatatataactgataatcagttaggtatataggggataaatcagtaacaccagtcgatattttatcaagcagaaatagcttatatatctatttgacagttaattaccctaattcagctaatgttttactctcttttatgtaataccacttctctaccgaaatgaaaactatttatcttataatcaatattatatctataaaacaaggagctattataaacaaaaaatagtatcatgctataagaggcgcttttatttgtatacaattaatcaggtaatggatgttgctaattaaaaacattgtcccattcatttttcttttaaaggcaaggaaatattgtaaatattggagactgcttatatattgatctgtcttagttgaggttagattgcaaaaaggctgctccgatcattggaacagccctctctatatttaaactcttctgttaaaaatcgtcagcagggaaacctgttcgacggaagcctgaaactttataagttaatccatcttcatcgtcgtcgaattgtaccatatatacgatactgtcagcaggcataccactaggagttgtggcagctttttccagtaccttgccatcagttattttcactttggattcatatgttacattatccacaaagcctgttgtcgagaaagtcctcgctgcataattcacgtttactttcagtttatattcccagaagtttcctaaatcatccaaccacatttcagtttcactgttgctggctgtattgtaagtactcatttgcagatgtcctgctccgaaaggatcttctacttctttcccgtcaataaatgcattcactgtcacccaccagtctcctgccattttttcaacagcagtaccacctggttctgtatcgttgtcgcatgccacgaatgtaaaagccagtgaagctaaaagtaatatcatatatttcttcataatcgtatttttattgttttactataatgtcaaaagatagctgaccggcataagcaacagtccatttcagagtcccagtcgcagggtccaataatgtattagtcatttgatccatggaatctccccaacctgcaacataactttccagaggagtaatggtattatcatcattcaattcgaatttgccaaccattgcatagtccggtccatagccagcacgctggtcataccagcctcctaagaaatcgctgatataaaaaatccccggttccatctggaaaatcacaatctcatatccactgaaagctaccacagaaggggcggtacgtttgcttccttcggctacggtataaattccggatttcaaaggagaagcagtattatctgccacatatactgttcgtgtaaatgttttggcaaaaccgtcctcgttgtatgccgcatatactaaattgtagattcccggagtgttgacatcaacactaccttttatctgaacagattcagtaatatcttctccgttcatttccgcataatatcccggctccacaaagggttgccctttttctaaaacgatcttttcatcaccctctctttccaacgtaacaaaataggtgactttagaagtgtcatctgttgatttgtcgcaagctccaaagacaaacggcaaacatactaatatgctgtatattatatttttcatacgtaaaacttactaagttattggttactatttgatatcccaccaaaccggagtacttcccggtacccctgcaggagtattcacattttgctgacgtgcgcttaatggataagtcatacgtttcatcagtccacccgcttccagaccattagtccatggagcaactaactctcccggagtgtatactgactcactagcctgtatctgtgctgctgaataagaagacagtttcggacaatctgtacgacgaatctcactccatgcttccatatgatccatgtagaaaagagatacccatttctgcatatatatcaagtttaacttgtctgcctgtgtagaagcagcagaccatgcacacgctccttccaaaatggtattctcttgacctgcaaatccacgaacggcaaagtctgcagttacacctgcttcataagcactctttgcattcgcatcatcattgtgaaaacgagcatatacctcagctatcaggaattgtaattcagcctgagtaaagaaatagacaggttttgtggctccgatagagtaatcaatcgcacttacgtttttatttttccagttgtcagtacccagaatgctttgcatatgtgtttttcctccgggaagttgaccgacatactttccatccgcatctgttttactaataccataagcgattcgagggtctcccgtgctgcttaaataagatactaacggataggcagcacaatgattaccggtcaagccgaccgcattcgtattataccatggattccgtttgtctgtttcatccaagaaacaatccaatttcacgtcaccggtaaagaattcgttgttttgtactaaggtcttcactttctctgtatacgaagccgcatctatgttggcatcaatgaaacgcagatacatacggaggcgaagagcattggcaaaacctttccattgagcgatatttttgttgaatatcaaatccggcacatccataccacttccatccaaagcagcttctgccgcatctatctcacctaatatacctttatatactgtttcacccgtatcccacttaggtgtggcattggcattaccttgcagagcttccgaataaggtgagtcactggtattatctaccattatctgaaaggcatatgctctcagtatggtagtagcgaatcggtcggcagggtttgtggtcttttccagcacctgctttgcatcttccaaagctcctgcaaacaggattctataagaataatccatttgctgggaagattcagtaaatgtatattcacatagagtgttatactgattcgactccggtttctgttcatagtactgagcgaaaaagccagcgtaattataaatttctccgcctaccgccgaagcaatggaagcactgatagaggggaatatcaaatccgccgtcacctgatcattcatcgggtagttcgggtcgtcattgatgttcaggtcgcaacctgcaaacaatgctgttgttgctaatgatgcatataataatatttttttcatttttattcctgtttaaaatttaaccattaagttgaaaccgaaacgacgtgagctgggattagccgtgtattctccatagttaccttcaaggtcgttaccaaatgaagtcatttcgggatcaataaatgtattgctggatggagtccagacaaataagttattgccatatgcagacacttttactgcctggaaaggagtttttgccaaccatcttttgggcaggtcccaacctaatacaacagaacgaagcttgacgtatgatttgtctaccaggaagcagcttcccatatcagagccaccgtcgccccagtatttataaatgttagagcttgtaataggagttgtattttctacataagtaacgttttctccattcactattttatttactgagttaggaacaatcaaaggattacggtcattgtaggcagtctgtatcgcgttaccggtaaaatagtttatatctttagtacgtgaatacatcactccgccctgacggatatcaaaatcaatgcctaagcttatacctttatatttcaagttagtagaaacacccatttgatatttgttattcatatctccgcagattccgaattcgctggcttcaaccggaagacctgttgatgaatttactacaatacgtccttgcggatcacgttcggctacctgagccttgaaaacaccaacaggcatgcctgttatagcgtacatactggtacctccattgagaccataaatcgttgtaatgccacccaattcttccggtaaactgatcaccttactccagttctttgtgaagttccatgtcagttcccaactgaaatcttttgttcttatcggagtgccgctgatcaggagttctataccacggttacgaatcttacccaggttcatattctgtgctgtatagcctgaagcagggtccatagccaaagagaaaatctgcttatcggtattcctattataataagatacgtcaaaagagaggcggtttttgaaaaaagccatatttaaaccgacttcagattctgtggtcatttccggacttaatgtattacttccgagtacatttcctgcagagtaagcgttgacacctcctagagggaaagtcagagaaccgaaaggtattctattggaagattgggcatacacaggattaaccatatacacatcagcatcgttacctgttttaccccagctggcgcgtatcttaccaaaagttatcacatcttgcagattgtcattcaataattcgctgaaaataaaactaccggtaataccaggatagaagaaactgcgattttctttcggaagagtagaagaccagtcattacgggcagtaaccgttaaatagagcatattcttccatgaaccttcaaactgtccgaaaacacccatcagacgtctgagttccatgtgctgttctactataggagttttgccggagttcttcagattaaaccatgtaggaatcgttaaatcattaacttctgaatattgataagagactttacgttcattgccattgaaaccgaccagtgcattgatattaaaatcgttaaccggcatattgaaattaaccataatatcctggtttatctcgcgacgacgggttatctgctcagaatattgtccggtttcaccagagaaaggactgctggagccctgaccttctccattaggagtaccttcataataaagagcgtacagattcggttttcctttgtcactttgtcctgttgtagtatccaagcccatacggtacgtaaacttgaaatatttcaggaattcataatccaattgaaattttccgtagaatctttcagattcatattcattcaaatagttattcaaaatataataagggttcataactccgtagggggtataataatatcccggagtgttgaacggatcattctggtcttccagtcctattatgctgatatctcttggtgtctgatataaagagtttagcatggacaaaccttgtcccgtagtagcaaagttattcttttgataagcgtaattcagtgaagaagagaatgtcaacgctcctgccttatggctgccgcgtgcagaaaaagtatatttatcgtagctgtcggcatctgtcgggatcataccatcatcgctgatctgagagaatgatacataataatcacttttatctgtagctccattgaatgaaaggctgttgctatatctgaatcccgcatcaaaaaagtctttgatgttatcaggcattgccacataaggtttcagtttctgagagttgttgtacacattaccccacaactgcatggaaccatcgaaacgaggtccccaggaaccgttctccaattctgtatggttgccgttccatcccataccaaattcattttgaaattccggcagacgcagaacagttgaccactgaactccaccgttatactcgattccaactcctttttctttccggccgcttttggtagtaatcatgactacaccgttggcagcacggctaccatacaaagcagtggccgcagcacctttcaaaatagtcatgtttgccacatcatccggattgatagcgttggcaccgtttccaaaatcatatccgctattcaagccatctgtagagtatacggtagagttattcaaaggtactccatccacgacatatagtggttggttggtaccggagagtgagctaactccacggataatgaccgaattagaggctccggggtcagatgaagtgctggaaatctgtacacctgcaatcttacctgccaagcttgacatcacatcagatgtacggctttccgcaattttttctccacccactgaagttgcagcataacctaatgctttttcagatcttttaatacccattgctgtaacaacaacttcatcgatctgttgagcatccgacctaagtactacctttaaattaggcttaatcgctacttcttgagtttgcataccgatgtacgaaatttgcaaagtctttgcagaactaattctttatataaagtgttgattattataataatgagaaatataaacctaatcgtcatatatgttattgtatccatatataaacgtgataatcaattatttatcagcattataactacccttttctttaacgaatgataccctgtttctatccatttcaatcatttagttcattcattataagaaagttatgtctttattttatttatatgaggtattattattggatactatttttatatttcccgaatatttctcaccaccaatcataatgaatgattacttttggggcgtgatagtagaaaaagatcaaatctgaagaaaagcatatttagttatggtataattcaaaatatgcagaacctgcttgggagaatgacaaaaatcggcaggattttaaaacagcagatctacggatgaaatacatctgtccgttttttgtttccttgtgctatatgattacttatatcagcttgcacctttgaatataaaagaaatatttagtttcgatatgatatatttccctgtgacaggaaagtctatcagttagaacagaattagaaattaaaactacttttggctcttccttttaaagcaattagatgttcctcggtgagtaacgatctgttccttttaaaggaacggatcgttcctttaaaaggaaagagtcctgacattgcactttttatgtatattacagtcatttatatgcgacaaatcatttgtaaattgcatattcttacattgatttatgcattatttctgccatattgttagattttgaatcaactctgttgaaaccaatcttaaaaacaggacatttccagacaatcactgcctagctttttggtctattagctaattttgaataggctgctttctcaaggtcatgcacaatagtcatgtccatgatatttgcatatacctgagttgtcttcacacttttgtgtcccagcagcttttgtacagtcgttatatttgcaccactatatatcaataaggtggcgtttgtatgtcgggctgtatggaatgatatccgtttgtctatttctgccagcttggctaatgcattcaagtctttattcacattagagttatctttcagcttgaagaatccgtttaaatcgtctttgtagttctccaacacccgcagtcctttaccttcaaataataaatataaaggaaggcgcacatcaatacctgttttaacagatttgtaaatcagccacgtctcctgatggagttcgacaatattcgcggcagtcagatttataaaatcagagtaccgcaaaccggcgtaacaacaaaataaaaaggcatcttttgacttttgtaacttcgtaaacttcccttccagattcacctcctccattttattcagctcttccggcgacaagtgcgtatgacttccttctatgcttttgattttatattttctgaaagcatacttctgaatatccatatactctttatttatagctacattcacatatcgttttaaatgcttcatatgcttggcaatggtattgagatgataccccttggactgcagataattatcaaatgaagacacaaattcgaatgtcaaatcagtgaatacaatgtcctttttatactcttgcagcaattctaaagtggaaagatgattctgcctggtgctctcttttaaagaagagttgctgacttcctctttaaaaaaggtcagaaatgaattcccattattttccggtttttcaatagagtctttcaacgaatccaaggatatcgatcttctctgttgccataatcccagttctttctgctcaatgtcagctataaaatcatatagcattcgatttaatgcatctgaattaggatggttctttaccattctacgttttacgtcccactggtctggtttgaggtataccctggttgagaagtacatttttctcctgtttaagtaagcttctacttgtaccaatgccattccttttttgttcagcttcttttttctgttaaacacaaggctgtaactaatcttcttcattctattgtcttttagttaatactaagaacaaaataaactaagttctgtcctataattaaggttgaacctgcattaatttctgcaaaaattaaaattcaataattaagtatttacataactttaatttaaatgctatttttttatcgtcatttcttcataataaatcaaaaagaaacgtttgcagggtagttttatatccaaaaacaagcaaatagaatgttaattactacactttgcattcacaaagtgacattccatgcttgataaatcacaatatttatagcaaataaagatgtttatcagcatattttcgatgttataaataacaatatgttatatatacaacctttttttatcaaattaattgttagtttcatatttattaataattttgcaacttgttagagtatagagacaattaatgtaaagttgaactttaagagagaatttatgaaaagaaaattaatgctgttattggcatgcctttttgtgggcataagcctagtaactgctcagactcagaaagtcacaggcgttgtgatttctgaagaagatgggcaaccagttgttggagcctctgtgttggtaaaaggtactactcaaggtacaatcacagacatcgatggtaattttaatttggcgaacgtaccaagttctgcaaagactttgcagatttcgtatattggtatgcaaacacaagaagtcgtaatcaaacctactttgaaagttttgttaaagtctgattctcagaatcttgaagaggtagtggtaacagctatgggtattaagcgctctgaaaaatctttaggttatgcagtatccagtgtaaaaggagatgagataactaaagcgcgtgaaagtaatgtgcttaattcattgtccggtaagattgcaggtttgcaaattgcacagtcgtctggaacggtaggtggtagttcaagtatacagattcgtggtgcttcctctattggcacagtttcttcccctttatttattattgacggacttcctattgacaatggttcttacaatcctgacagaaccaatggtatagtcgatgtaggtaaccgtgcaggagatatcaactctgacgatattgaatctattaacgtattgaagggtgcagctgcaactgcattgtatggggcacgtgcaaaagacggtgcaattgttattactactaagaaagggaagaagaattcaccggtatttgttacggtaaactcttcaacacgatttgagaatgtacttaaattgcctgatttccagaatgagtatgcacaaggtagctacggagtatataatgtaaaaatgctgaatggatggggaccgaagatttcatcggtacaagatcagcaatttacagattataaaggagataaagtgaccttgaaagcaaatcctgataatgtgaaggatttctatgaaaccggaatgagctatattaataatgtgtcagtagccggaggtggtgaaaaggctgatttccgtttgagctttacttctactaatcagaccggtgttgtgccaggttctgactataacaaatatgcattctctgtgaatgcaggtatgaactttactagcaacttcacaggacgcatctctgcccaatatatacgttcagattctgaaggtcgtccggcacagggggcaaatgatagcaacttgctgattcctttaatcaatggattgccaagaacgattgatattcatgatattaagcagaactggattgatgaaaatggcaaacaggttacgttggatccggaaggcaaaagtaataatccgtactggattattaataagaataaatttaccaataatctggatcgtatgatcggtaatatcacattgacttataagccgattgaaggattgactatcactaacaatgccggaactgacttctatacagaaggaagacgtaaactttacgcaaagggtactgtaggagccttaaatggtaagtttcagacttggaatttgtataaaagaattataaataatgacttaatggtttcctatgagaagacttttgccaatgattatcattttaaggcgatggtaggtcataatctctatcaggaagaatggaagaatgaaaatgtacaagctcagaacctggtagttgacggattgtatacatatactaatgcgaaatctactactccggtgaattattatgaaaagaaacgtcttgtcggtttatatggagatattagcttgggatacaaagatatgctttttattaatgtaacaggacgtaatgactggtcgtctactctgcctattaataaccgttcttatttctatccatctatcagcggtagctttattttcacagaattgatggagaataaagacatcctgaattacggtaagattcgtttaagttatgcgaatgtgggtagtgacgaagatccgtacaatttggcatttaaatatactccagctagtacttactttttgcaatatctgggtaatgtcaatactttcccacacatgggactggttggttttaccgggcctcgtgttctgccgaatgaaaacttaaaacctcagaaccaaagttcattcgaagtcggagctgatttacgtttttttggtggaaagattcgtttggatatgacttattatagcaatatcacaaagaatcagattgtaagtattgatgtcccgttatcaacaggttactttgctaataatatcaatgccggaaagattgccaataagggtgtcgaagtaactttgggcttgactcctgtagaaacacgtaactttaaatgggacttggatgcaacgtttgcttctaataagcagactgtagaagagttggctgaaggacttgatgaatatacattgactagcggattgagtggtttgcagattaaggctgccaaaggtgattcgttcggtttgtacggtactgcctggaagcgtgatgatcaaggtaattatgtaatcaactctaagacaggtttgagagaaacagtcaataacgtacgtttgggagacgtttatcctgactttacaatgggtatcaacaatacacttacttataaagggctgacttttagtttcttgattgatatccgtcatggaggttccttatattcggaaacagtagctaatttgagaagcagtggtttggctgcagaaacagtggctcaccgtgaagatgcctcttttattgaaccgggtgttattcttcaggatgacggaacttacagacctaatgatgttccggtgaagagtatgcaggactactggcagcatgtggcgaactccagtaataatgaaggaaatatctataatgcatcatttgtgaaacttagagaagtgcaattgtcctatagttttccgcgtaaatggtttaagagtttctttgttaaatcattggatttaggcttcgaggcacgtaacttatggatcatcaaagatcatgtgccgcatattgatccggaagctaacttcttcggtccttctcagatcggaggcggtgtagagtttaacagtatcccttctaccagaagtttcggatttaatctcagactaacattgtaagaattaaacgaacatgattatgaaaaagaaaatattagcatatgcattgagcgctttgacatgtgggttatttacttcatgcagcgactggcttgatatcaaccatgaccccaatactgccgagaaagttgatcccggatatttgtttaactatgtagccgtaaactgggccggaacacgtaccggtggtgacttctatattccgttatcaatgagttcacagtgtcaggttgacggtggacttgattatggtggctgggatgaatcggtatataccatttccccttatagtacaggaaatacgtggaaacattactactctgtcggtggtaataacttgatgctggctattaaaaatgcggaagaagcagatccggtgaatcacaatgctattgcacagtgtaagattctgttggctgaacatatgtatgaagcgacgatgctatggggggatatccctttcactgaatcttggaacggaacaattaagtatccgaaatttgattctcaggaaagtgtattgaatggggtgttgtcattgcttgatgaagcactgcagatcatggatttgaatgatgccaatgcgattgatgaatacgatatctattataaaggtgatatgaataaatggatgactttggccaaatctttaaagttcagaacactgatggttatggtggacaaagatccttctaaagctactgccattggtacgttgttacaggctggaggcatggtatcatcagcatcagataatttggtgttcccttattctgcagaaccgggtaaccagaatcctaagtatgaacttatagaattggttggcggtacacagatattgttttttgccagcaactatatgctgaagccgatgcaggaacgtaatgacccccgtattccttgttattttgaaccgggtgccgacggtgtatatagaggcttaggtaaccgtgaacctgctgttactgatgacaaagataatatgttatcatctgttgtgagcagttatcttttcagaaaagatgcaccggagttaatatactcttgccaggagcagttgcttctggaagcggaagcttatgcgcgcggtttgggagttgctcagaatttgtcgaaggctaatgaattgtataagaaaggcattcgggaagcatgtgcattttatggagtagcggaagcggatattgatacatatgttacaggtttgccggaattgacagcgctgactcaggagaaagcactgtatgagattcatatgcagcagtggattgatttaatggatcgtccgtttgaggagtttgtacagtggagacgttctggtactgctggaaatgaagtcccgaccttacaagtgccggaagatgcaacttcaaaagaactgatcagaagatgggagtatagcccggaagagatgactgctaatatcaatgcaccgaaagaatctccgaagatttgggaaaagttatggtttgatttataattgaattactataaatggttacgaaaaagaggacaatacaacattgtcctctttttttttgttatatttgcgaccatatttagatttatatagtagaagttaaagaatgaaagaatttataatatccgaagccaaagtagaaaccgcagtacttgtcggactcattacccagatgcaggatgagcggaaaacgaacgagtatctggatgaattggctttccttgctgagacggctggggcggaggtagtgaaacgatttacacagaaattaccgacagccaattcggttacttatgtcggaaaaggaaaactggaagagatcagacaatatatacggacagaagaggaagaagaacgtgaagtgggaatggtcatctttgacgatgaactttccgcgaaacaaatacgtaacattgaagccgaactgaaagtaaagatactagaccgtacttcattgatcctcgatatatttgcgatgcgtgcacagactgccaatgcgaaaacgcaggtggaactggctcagtacaaatacatgttaccacgtttgcaacgactctggactcacttggaacgtcagggtggtggctccggtagcggaagcggtaaaggaggttctgtgggacttcgcggaccgggtgaaacacagctcgaaatggaccgccgtatcatcctcaaccgtatgtcactattgaaagaacgtctggtggaaatagacaaacagaaagctactcagcgtaagaaccgcggacgcatgatccgtgttgcattggtcggctatacaaatgttggaaaatcgaccatcatgaacttgctgtcaaagagcgaagtgtttgccgaaaacaagctgttcgctacactcgatacaacggtacgcaaagtgatcatcgataacttgccgtttcttctgtcggacacggtcggatttatccgtaagttgcccactgacctggtagactcattcaaatcgactttggatgaggtgcgtgaagccgatttactggtgcatgtagtagacatctctcaccccggatttgaagaacagatcgaagtggtgaacaagacacttgccgacattggcggcggtggcaaacccatgatacttatattcaataaaatagacgcctacacctacgtggagaaagcgccggacgaccttaccccccgaacaaaggaaaacttaacactcgaagaactgatgaagacgtggatggcaaagatggaagacaactgcctctttatttccgcccgcgaacgaatcaatatagacgaactgaaagatgtagtttatcagcgagtgaaagaattgcatgttcaaaagtacccctataacgattttctttatcagacttacgaagaggaagaataataatcaatgtaccgcttactgattgggggaggcggtacatatctatttttatctatatgaaagactatcgtaaattgactgaggacgaagtgcttcagttgaagagccagtcgtgtctggctgatgattggggaaatgttttggttgccgaggggtttaactgtgagtatgttcaccatacccgcttttcgggtgaagtgaaattaggcgtatttgatgccgaatttacactgcccggagggatcagaaaacattcgggactccgtcatgtaactctgcacaatgtggtagtgggggataactgctgcattgaaaacattcaaaactacattgctaattatgaaatcggaaatgataccttcattgaaaatgtagatatcattttggtagacgggctaagcacctttggtaatggggtggaagcgacagtgctcaatgaaacgggcggacgtgaagtgctgatcaatgataaattgtcggcacaccaggcatacatacttgcattgtatcgtcaccgtccggaactgattaatcgcatgaaggcgattgccgattattattccaacaagcatgcttctgcggtaggtagtataggtgatcatgtgatgattctgaacacagggtctatcaagaatgtacggatcggtgattattgccatatctgcggtacttgccgtttgacaaacggtagcgtcaacagtaatgtgacagcacctgtacatatcggacatggagtgatatgtgatgatttcataatctcttccggctccgaagtagatgacggaacgatgctgacccgttgttttgtcggtcagtcttgcaaactgggacataactattcagcctccgattccttgtttttcagtaactgccagggagagaacggggaggcatgcgccatctttgcgggacctttcacggtgactcatcacaaatcgactttattgattgccggtatgttctcgtttatgaatgcgggatcgggatcgaatcagagcaaccatatgtataaactggggcctatccatcagggaaccatggaaagaggagccaaaacgacctccgactcctatatcttatggccggcacgtgtcggagccttttctctagtaatgggacgccacgttaatcatgccgatacctccaatcttcctttctcttatctgatcgagcaacggaacacgacttatctggttccgggagtgaatctgagaagtgtgggtaccattcgcgatgctcagaagtggccgaaacgtgacaagcggaaagacccgaaccgattggattatatcaattataatcttctgagtccatacaccattcagaaaatgttcaagggacgttctattctgaaagagcttaagcgggtatccggcgaaacatctgaaatctattcctatcagagcgcaaagatcaagaactcctctttaaataatggtatccgtttttatgagatcgctattcataagtttttgggtaactccatcataaaacgcctggaaggcattaatttccagagtaacgaagaaatacgccagcgtctgaaaccggacacggaaatcggaaccggcgaatgggtggatatgtccggactgattgctcctaagagtgaaatagaccgtctgctcgatggcatcgaaaatggttctgtcaaccggttaaagtccatcaacgccagctttgcggaaatgcatgagaattattatacgtatgaatggacctgggcttacaacaagattcaggagttttacggcttgaatccggacgaaataacggcacaggacataatccgtatcgtaaaagcgtggaaagaggcggtagtcggtcttgataaaatggtatatgatgatgcccgtaaagagttctcgctgtcttcgatgacaggattcggagccgatggttctcacgatgaaatgaagcaggacttcgaacaagtacgtggtgattttgaaagtaacacgtttgtgacggctgtcttgaagcatattgaggacaaaactgcgcttggcaatgaattgatcaaaagaatcgggtccattcaagagtaaaatctaaagtcggcttattggttagtcgcctcattaacagtagttattgtgatctaaagttctcagaccattctcatctcgatgagaaaaaattctcaccacaatgagaaaattttctcatcgcagtgagaaaaaatactcataggcatgagaaaaagttctcactgcaatgagaataaattcttgttgcggtgggcatagttcctttctgcgttattcattcttaattcttcattcttccgttatcattctttatttttaattactacctttgcctcactaactaacattacgtaataaaataagaaattatggcaacacctccgtttaagtatcaacccatgtttgaaaagggaaaagataccactgagtattatctgcttacaaaagactatgtatcggtaagcgagtttgaaggaaatcctatcctgaaaattgagaaagaaggcttgactgcgatggcaaatgcagcttttcgtgatgtgtcattcatgcttcgccgttcgcacaatgaacaggttgctaagattctgagtgatccggaagccagcgagaacgataagtacgtagcactgactttcctgcgtaatgcggaagtggctgccaaaggtgtacttccattctgtcaggataccggtactgctattatccacggtgaaaagggacagcaagtgtggaccggctataccgacgaggaagctctgtcactgggtgtttacaaaacatataccgaagaaaacctgcgttactctcagaatgcgcctctgaatatgtatgatgaggtaaatacaaaatgtaacctgcctgcacagattgacatcgaagctaccgaaggcatggaatacgaattcctctgcgtaacgaaaggtggtggttctgccaacaaaacatatctgtatcaggaaacaaaagcaattttgaaccctggtacactggttccgttcctggtggaaaaaatgaagactctgggaactgccgcttgtcctccttatcatatcgcttttgtgatcggcggtacttctgctgagaagaacctgctgacagtgaaactggcttctactcacttctacgataatctgccgactacgggaaatgaatttggccgtgctttccgtgatatcgaactggaaaaacaagtactggaagaagctcacaagatcggtctgggtgcacaattcggcggtaaatatctggcacatgatgttcgtatcattcgtctgcctcgtcacggtgcttcttgtccggtaggtctgggcgtatcttgttctgccgaccgtaacatcaaatgtaaaatcaataaagatggtatctggattgagaaactggattcaaatccgggtagcctgattccggcagaattgcgtcaggccggtgaaggtgatgtagtgaagattgatctgaaccgtccgatggctgagattctgaaagaactgaccaaatatcctgtatctactcgtctgtcactgaacggtactatcatcgttggccgtgacatcgctcacgctaaactgaaagaacgcttggatcgtggagaagatttgcctcagtatatcaaggatcatcctatttactatgctggtccggccaagactccggctggtatggcttgcggttcaatgggcccgacaactgccggacgtatggactcgtatgttgagctgttccagagccacggtggcagcatggttatgttggcgaaaggtaaccgtagccagcaggttacagatgcttgtcagaaatatggcggcttctatctgggttctatcggcggaccggctgcaatccttgctcagaacaacatcaagagcattgagtgcgtagaatatccggaactgggcatggaagcaatctggaaaattgaagtggaagatttcccggcatttattttggtagatgacaaaggaaatgacttcttcaaacagataaaaccacgttgtgccaaataacaagtaataagtaacaagtaataagtaatggcaagttattcttgcggttgattacataaacattcatttgggatacctgtcagttttcgtatgggtatccctttttttataaacttgcttatctaataattaaaacaccatgaaaccactagtgatgaatttatccaatcaaaagaaccagcatattgtttggctggatgtcgttcgttttattgcgatgtttacagttgtctgctgtcattgcaccgatccgtttaatttttatcccggcacggctccgaatatcggagaaataaaactttggggggctatttacggatctgtactgcgtccgtgcgtgcctctgtttgtgatgattaccggtgcattgcttctgcctgtaagaggtgatgcttctactttttacaagaaacgtattccccgcgtcttttatccgttcctgatatggtcggtgctctataatctgttcccttggattacaggcctgttgggactgaatcctcagattattcttgatttcttcccgtatgcgggagaggaagtgatgcagcaatcattctctgtatctttggaatatattttgatgattccgttcaacttctccattttagccgtgcatatgtggtatatttatctgcttatcgggctgtatctgtatttgccggttttctcagcttgggtagagaaggcttcggaacgtgccaaactgatgtttctgctggcttggggggtaactttgctgcttccttattattatcagtttgtttctaattatttatggggaacctgttcatggaactcttttggaatgctgtatgcttttgccggtttcaatggctatctgttgttggggcattatctgaaaaatctggaatggagcttgaagaaaacgttggcgattggcattccgatgtttgcagtcggttatgcggtgacattcttaggtttcaggcatataaccgcattgccggaatatacggatgagatgctggaactcttctttacctattgttctcttaatgttgtaatgatgacgatacctgtgtttatgttggcaaagaaagtaaaagtgaactcggaaaggatgaaaaaggcattggcgaatctcactgtttgcggattcggtatttatatgatacattatttctttacagggccgtcggtcgtgctgatgagagctattaatatgccgattggtttgcagatacctgtagccgctattcttgctttcgccgtttcatggggattggtatggctgatctatcgtgcaggaaaggttgctaaatatatagtaggatagtcatagaaaatagaaatagatgagaggttatcaaaagtcaatagtaactaaactccttcaggaaggaggagagtttagttactattgacttttgacatcccctcttatcgcatcctccggtattatttcctatttaattccttcttccatttctcatattttgccagtactttgctgccgtctttattgtaccagctatatccgttccggcgttcatgtccgatttctgagatatcgtattttttaattccgtcgcggtcggagaagaaaggacgattggtgtccagttcataaaaacgtgcccatagtacgggacaatcttcgcaagggatcatctggtaatctctttttccgtcactgttggtgaagtattctttttgtattccttttatttcggacttcttgaaccatttgacggctgattctatcgattcaattactttttccgatggatgggggagagacatgagcaaaagcacgatattgtcagattcttgtccgctcaatgaaggcaactcatatgcacgtgccttgcagggctccagtgtgatgcggtcatgctgcgcgcaccatactgtcagttccccgttttggcgaacctgtgtccggaggatacattctattcctttgtcaaaggctttacgtgcttgctggcaggtttcatcggggatgaaagtataaggggactgcttttcgtagatttcccgtaactgctgcatgactctgaccattgcgttatcattgtaggtgatttggatatagtatcctgtaggacgcggataaaactgaggccatccgccattgtcatattgtgctttgagcagatattggatacctttcagtactccttctttgtatttctctttttgtgtagcttgataaagacgggccagatattgaatttcggttgtcgtggcgttgttgtcaatggtactttggttgacgtctcctttcgcattccatgctttggtgtattcctgctctgtcagttctgccggcatgtaaatgtttttgggccagcctcccgtgacttgctgatacaataatacattgtctccgatgcgttgtgcttcttctgtccggaaaaaggcatcattgaacttgggagcgaggtgtacccattctttgtaattctgttgtttcctgtaatctgttgtttgggctgaaactccggtctgaatgaaaagtaacagaaagaaaaaggctgtttgtctcatgacttctattgttaagtgaatgttatggtgtgtgcaaatgtagaagaaaaggtcgggaatgaagggtaatatctgttcttaatggcataaaaattgggctaatcgcttttatcagatgattagcccaatgaaaacaggagaatcaatgttttattgctccagatatttggtgatttttccgctgatttgcagtagtgaaatttcgcaaagtttggtgttgtattctgccgagagaatacgttcttcggcatccagcagactcttttgtgcctcgcgtacttcaaaaccggaaaggtctccctgtatataacggtccatggcgatatcatgattgtctttggcagtcacaagattctgccgttccagattcagcagctgaagattattacggtatgcttgccacaagttgctgagatcggaacgaagggctaactccagttcctgtcgttccaaacgacgattcttgaaggcaagggttgcgttgcgcttttcacggcggcggttgccgtcgaagatattaaaaccgacagtaactccggcattaaagcctaagttgcctcttctgctatttgcattgatatcatacttattaaaggtatatccatagccggtattcagtttgaggtatggatagttgcgggagttgatctttttgtaatccagctgtgccagtacggtgttctggtcggctttcagcaaagaagcattggtggataaggtagcattccataaatcgtcgaacagtaagtcactgtgtacgtcaatggtagaatctttgatgacgataatctgatttacattattgttggccatcaattcattaagttggatgcgtgaggagtgcagcaattcctgttgcttgatgtattgggcactgtccgcattgaagtccactttggcttgctgataatccaaacctgagaatttaccgacaagatggctcgcttctgctatacgcaagcgttctttggaaagtgacatcgcataatgaaagttcttcaaacggatcttttgctggatgaagttgtagtattccgaggcaagatcggcgatgaagtcttcaatggcaatgcgggtattgatttcgccctgccgttccagttcctttagttgcttgtacgtagtgctgatattgaatccgtcgaagatggtccagttgaggttgaggccgacgttaactgtctggtcgtagactccattatttttggtgacctctccggtggcacgggctttcgtctcgatgttgtccaggtttccggtatatccggcagaaaagtccaaagtaggcagataacctgcatttccgagtgtcgcgttattcttgctgatctgttcttcgttatggacgatgcgcagagaataattgttttgcagcccttcttccaggcagtcttttaaggaatagattcgctgtgccttcactggagaaactaatacgaagacacatgcggtaactatgtatatgatttgtttcatgcaaatacttttctgtttcattcttttgttattttgattcggttagtcgaaatataactgtagatggccggcacgatatacatagtaagcagtgtggaaacaaccataccacctactacagccgtacccatggcgatacgctgattggcgccttctccgctggcaaatgccaatggaataagtcccagtacagtagaagcacttgtcattagaatcgggcgcagacgctgtaatgcggcatctttgatggcgctcattttatcctcgcctgcttcttgtttctgattggcgaattccacgatcaggataccgtttttagccacgagaccaatcagcatgataataccgatctggctgaaaatattcattgtgatatctccgaaatacatgaataccaaggctccggcgatagccaaaggcactgttaacatgattattaacgggtccttgaaactttcaaactgtgctgccaggatcagataaatcagaaggatagccaaaataaaggcaaacatcaggctcgaagaactttcacggtattccttggagtctccggataatgcggtacggaaagtatcatccaatgtttctttggcaatcttgtccatttcatccagtccttgtccgatggtctttccgtcagccagtccggcggaaattgtggctgatacaaatcggttgtagcggtacagtttgggtggagcgataccgttttccagctcaatcagattatccagctgtatcatatctccattgctgctgcggatgtagatagctttcaggtcggcaggcttgtttcgttgctggcggttgatttcacccaaaatttcatactgctttccgttcatatagaaatatcccatacgctggccgctcaatccgtattgcagcgtttgggcgatgtttttggtactgactcccattacacttgctttgtcacggttgatcttgatgcgggcttccggtttgctgaacttcaagtctacgtctgccatctggaaaaccggattctcatatactttggccatgaactgcggtaatacctcctgcagtttttcaagattggtagcctgaagtacgtattgaacaggcatacttccccggcgtccgccgaaagaagactgctgttgtacgaacgagcgtgccatggtctttttctgaactgcctttgatatcttttccgcaacttccatctgcgtgtagtcacggtctttcatgtctttcagtgtaatgcgtacgtttccgctaccactggatacacgtgctgtcaccgcttccgcatccggcagaatagaatctacaagctggttgatatcttcggtatagtcccggatatattcataagtgacaccctccgcacctcgggtgttgatcgagatttgcgaccggtcttcaagcggtgccatttctgccggaatagcattccataagaagccgatcaggcagatggttataaaagtgaacggaagtgccagccagcgcttgcgcaaaaaagcagcgagcgaacggctgtaccatcggttcatcccttcaaaaaacggttctgttttagtgtagaaccagttttgtttctcacgtttgatgagtaacttcgtggccagcatcggtgtgaaagtcagtgccgcaaatgaagagataatgacagaaccggaaattacaatactgaattcccggaacaaacgtcctgtcataccttgcataaagacaatcgggaagaatactgcaactagtgtgatggtcgttgaaataacggcaaagaagatctctttggctccttctattcccgcttctttcggactcattcctttttcgatacggatatagatgttctccgtcattacgatggcgtcatccaccaccagtcccacggccagcacaatggcaagcatggaaagtacgttaatggagaatccggcaagatacatgacgaagaatgctccaatcagcgatacgggaattacgatgcacggaaccagcgtcacccgccagtcgcgtaagaaaaggaagatgatgatgataaccagaataaaggctacatatacagtctcttttacctcattgatagatgcccggataaatttggtattatcaaaaccatagctatacgtcacatcttccggcaggtccttcttcatctgttccatgcgtttgtacacagcatcggcaatttcgatgtgattggctcccggctgtggaataacaacaacacctaccatgggtacaccgttcattttcatgtaactcttgatgtcggcaggaccaagttctgcacgtccgatgtcactgaaacggacgatacggttgttatcttcttttacaataagattattgaactcatcggcagtatgcattaatcccaatgtacggattgtcagttcggtagtgtttccttcaatactacccgaaggaagttcgacattctcattgtctaccgcattctttacatcaatcggagtgataccgtatcctgccatcttgaccggatcgagccaaaggcgcatggaataacgcttttcaccccagatggatacactacttacatcagagatggtctgtaactgctctttgacggtcaagtctgcaatctcacttaattcaagcagtgagcgtttgtcgctttggagggcaaccattaaaataggcatcgcatcggcatcggcttttgatacagtcggcgggtcacagtcccggggcagataacgttgggcacgggaaactttgtcacgtacgtcatttgctgcagtttccagatcgactgaaagctcaaattctaccgtaatacggctttgtccctgctggctgacgctggatagagaccggatgcccgggataccattaatattttgttccagtggctcggttatctggttctcaattacgtcggcattggctcccggataagaacaactgacagaaatgatcgggttgtccaccgatggatattcacggacacccagataactgtatccgatgaagccaaagaggagaataatgattgtcagtaccgtagctaataccggacggcgtatacttaattcagatatattcataaggcatggcaggtattagtcaatattgtccaatgtaacaggaagtcccagacgaagttgcagtgttcctgatgtaagaatggtatctcctacttgaagtcctcttacaatttgtacttcagcatccgtacgaatgcctgttgtcacttctacaggctcagcttttcccgatttatacaagaagactttatcctttcccatttccggcacgattgcttccgttgggatggcgatcgcattcggaatttcttcttttttcaattggatacttgtatatcggccgggaagtaaggcgcgattggtatttggataaagtgcgcgtgctgtaaattgatgcaggttgggatcaatcgttgattctacagcatatacctttgcactgaaggcatctagttttccttcaattctaaaattcaggttcgtaccttttttaatctggcttgcatagcgttccggtactgaaaattctactttcaacggagtaatctttgtcagtttggcaacaatagttgtcggtgaagcgtatgaaccgacactgatttgccgaagtccgatgattccgtcaaatggagcacggagctcggttagggcaatgttcgcttttactatttctatatcagcgtttaaagttgccaggtcagtctttacttgttcataagcttctttactgactgcatctcgtttgagcagagcatcttgtcggaatacacggtcctcagctaactttagttgtgaaaccaaccgttgaagttgtgcctgtagctggcggtcgttcactttggcaagaagttgtcctttttttacgggagttccttcttcgaagttgatctctattactttcccggaagtctcaaaagacaaatcaacttcttcatccggcagaagtacgccggtagtggtgtattcgtctgttaataattgaggttttatgacttttgcattaacattgagaattttcttctcattcttttgggtgttttttactttgtcagcagcagccagttcgtcgttggttttgggtaactgtgagtaaattcctccaccgataattccggcaccgataagaatgatgatgccccatttagtttttttattcatggtttagtatagtatatatagcatgttatataatatcttctgatgattagacgatacctttcaggaaaggtttaattgaatatagtgtaaaagaaagttaactttctgcagggctgtgataattgatagcaggagaattcgggattgttttatctgttaattggtattcgaattttagaatcaatttattaaaactcgtaaaactttgcttaagatttaaataaagttaaagttgtgtttgtggttatttgacttttagagtcgaaatgtctgattattgtcgctttttaaaataaaggcaaggctattagtgcgaatttagagtagatagtgctaactatatgtcatttctttcgttttttagcaaattgcccgtaaaaaatgtcttcctgaaaaatttgcgtataaatataaaggtttatactttcgcaaagttttttaggaatttataaacaagaacatcacaaggttaaaacacgtattctttttttataatagcctaattaaacctgtcgtgagtttaatttttattagggtatttaactttttaaattatggatgaacctatagtgagggtagagcacctttcacatcgctacagcgtacaatgggctatccgggacattaatctggagatcaagaaaaaaggagtttttggtctgttagggtctaatggcgcaggaaagtcaaccactatgaacatcatgtgtggggtgttgaaccaaacagagggtgaagtatttgtaaatggtatcagtttgagagaaaatccggtcgaagccaagaaatatataggcttccttcctcaaaagcctcctttgtatgctgactttacggtagatgagtacttggtttactgtgcgcaactcaggcacatggagtctaaaagtatcagagctgccgttgactatgcgaaagaaaagtgtggaattatgcactatagcaaacgtctcatcagtaatttgtctggtggatatcaacaacgtgtcggtattgcccaggcgatcgtacataatccgctgttcgttgttctggacgaacccaccaacggacttgatccgaatcagattgtcgaaatccgtcatttaataaaagaaatagcggtagaccgtgcagtgatgctgtctactcatatcctgtcggaagtacaagccacttgtgatgaaattaagatgattgaacatggaaatgttgtattttccggaactatccgtgatttcaataattatatggcccccagtactttggtgactatcctggagaatcctccacaaacagaagaattagagaaaattccgggtatccttaaagtcgaaaagctgactgctactcgtttccgttttcattttgatggaaacgatcatggcatgacacgacgtataacggaaatgggcgtggaaaaagggtggcgccccagcgaaattattcttgaacgggactcattggatactgtttttgcacagttgtccggaaaaggaataaaaatcgattaatcacaaaatataataaaacattgatatgaaaactacatatcggatagccattgccgaattgcgttccttattttgttccccggtggcatggcttattctagttatttttgctgtgcaggtaggtgtggcttttggaaatgcgtttgatcgtcaggtacagggacaagcattaggatatactctttgggatgtgacagcctctatttttacaggttggatgggaatctttccgggcttcctgcgtaacctttatttatatatccctttgttaacaatggggttgatgagtagggaatatagtagtggttctataaaactgctgttctcatctccggttactgacagccaaatcatctttggcaaatacttgtcggtattgatttacaatttggtattgattcttcctttgttggttgtaggggtgttttgtggcattactattacaaatgctgatttaggtttactctttaccggaatattgggtatatatttgctgatttgtgcttatggggctataggtttatttatgtccagcattacttcttaccaagtagtagccgctatgggaactttggctgtattggctgcattgaattatgttggtgaagtaggacaggattatgcttttgtgcgtgatattacatattggttatctatatccggacgtgcggatgaatttataaacgggttgatttgtagtgaagatctgttttatttcttattaattattgcattatttttgactctctctgtactgaaactgcgtgccggacgtcgtaaagtatctcgtgggaaaacatggggaacttatggcgctgtggttttggcagctttattggtagggtatatttctacgttacctactttgaaagtatatcacgattcaacggcaacaaagcgcaacacgctgacgaaaacgagtcaggacattatgaagcaaatagatggcagcttgaagataaccagttatatgaatctgctggatgataattatgctattgctttgccaagtcagttaaagagcgattatgagaggtttgaaaagtatattcgtttcaaaccggatacgaaaatggagtatgtttactattatgatgaggccaattctcaattggatttccgtcttgaaggctgtaatactcttgaagaaagagctcagaaaatggcaaatattctgaatctgaatatcaatatgtttttgactccggaacagattcgtgagaaaatagatttgcggaatgaaggaaatcactttttacgtgttgtagaacgggataatggtcagaagagtattttgcgcttatttaatgataatgaaaagcatccgtcggaaactgagatttctacagctttgaaacgttttgtggtacagtcaccgaaagtcgcttttcttactggtcatgagatgcgtgatatttataaaacgggcgaccgggattataatcaatttgcagagaatcaatatttccgttattctttgggaaatcagggatttgatgtcgtaaccttgtctttggaagatcaggaggtaccggaagatatagatattgtggtgatagcagatatgaaaacgccttttgatgagattgaaaatgatcgtttgaataagtatatcgctcgtggaggaaatcttttcatcttgggtgatgcccgtcgtcaggaaataatgaatcctataacggaacagataggagtgacttttatgccgggaacattaattgaaatgaaagagaatgattctccgtctttgattgccgggcatataacaaaagaagctgcacaacgttttaaaccttatacccgtccatatgaattcaggtctgtcatcacaatgcccgatgctgttggtctggcatttgatgccactaaaggtttccatgccactccggtgattgttacagactctttatgttggaatgagttgcaaacaacggactttttagatgataaacctcagtataaccctgaaacgggtgagaaacaaggtgttattcctacaattttggcgcttgaccgtaaagttggtgataaagaacaacgtatcgtcataacaggagatgcggactgtgtaagtaatggagaaatgagcaaaagccgcaatggttattcatctaataattttacagtaattaccggaactttcaaatggctttcttacgatgaatatccgttggatacagagcggattaatccggaagataatgcagtgtctgtaggacgtgatgcacgtaaaatggtgagatatggctgctacgcacttttgccgcttatctttgccgcttgtggaattacgatccttgttcgtagaaagagaagataataaagagtatccttataaaatacaaacacatcatggaagaatctattgtcagagtagagcatctctctcaccgttatagtgtagattgggctatccgcgatataaatcttgaagtaaaaagtaaaggggttttcggtctgttgggttccaacggtgccggtaagtctacaactatgaatattatatgtggggttttgaaccagacagaaggaaatgtctggattaataacatcaatctgcgtgagaatccggtagaggcaaagaagttcataggttttctgcctcaacgtccgcctttatatccggatatgacagttgaggagtatcttatttattgtgcaaatcttcgtctgatggaacctatggagattgggaaagccgtagagtgtgctatggctcgttgcggagtaactcattttcgttcacgcctcctgcgtaatctgtccggtggttatcagcagcgtattggcattgcacaggctattgttcatcatccgcaatttgttgtgctggatgagccgacaaatggtctggatcctaatcagattgtcgaaatccgtaatttaattaaggaacttgctaccgatcatgcagtaatgctttccacgcatattttgccggaagttcaggctacttgtgatgaaattcgtatgattgaacatggaaaagtcgttttctctggaagtatggatgattttgataattatgttgctcctacttctttcactgcaacattggcgaatgctccgtcaatagaagaactaggcaaactaaaaggtgttacttctgtcgatagtttgggcgattgtcattaccgctttcatatagtcgaaccgaatggaataaccgagaaaatgattgctgccagtgtcgctaatggatggcaactggaagagattcagttagaacgtctttctttggatgagatttttgcacgtctttccggaaagaagtaaacacaaactcagaaaataaaaataagtatgaaaactatatggaaaatagcaaaggctgaactgaatactcttttttgttcacctattgcatggttaatccttatcatattcgcatttcaggccggactgacattttccgacctgatttccgatcagttacgttatctggcgctaaactatcgtccttataatctgactagtgctttgttgttaggatacagtggtgtttattcaagcatgcaggataacttgtacctttatataccattacttacaatgggattgatgagtaaggagtatagcagcggttccatcaagttactgtattcttctcctatcaccaatatacagattattctgggtaaatatatatctatgttggtatatgcattgattctggttgctatcttgtttgcctattttatatatagcgcatgtattgtggaaaactttgattttccgtttgctttgaccgggatacttggaatctttttgttggtatgtgcttatgcagctataggtttgtttatgtccactttgactgcttatcaggtggttgcggcagttggtacattgactgttcttgctattcttaatttcatgggtaatattggacaggacattgattttgttcgtgatcttacctattggttgtctttggcaggacgctcggacaagtttcttcatggcatgatttgtagtgaagatgcattttacttcattattgtggttgtactgttcttgtcactttctattttgaaattgaagttcgaacgcactactgccaatagtttaagtaagatgatgcagtatatcggtgtgttgtgtgttgcattactagtcggttatgtgacttcccaacccaagctaatgtgttactatgatgcaacagcaactaaagcaaatactttgactcctccaagtcaggaagttatgacgaagctggacggtggattgactcttacgatgttcgttaatctgctggatgataatttcaacaagggaatgccgaaaaacaggaactgggaaatgcgtaagtttgaagactatatccgtttcaaaccggaaatgaagatggagtatatttattattatgaccatacagataatcctcgtctttacgcacaattctccggactgtcagacaaagaaatagctcagcgtttgtgcgatacttatgatctggactttaatatgttcctttctccggaagagatcaagaaaataacagattccaagggtattaatctggaagaagaaggcaatcgttttgtttatcttttcgaacgtgaaaatggtcaaaaagctttcttacgcatttatgatgataatcagcgtgatcctcgtgaatcagaaattacggctgccttgaaaactatggttgtcaagtctccgcaggttgcttttatcacaggacatggcgaacgcgatgtttacaaaggtggtgaacgtgattatagtgcatttgcaaaaaatctctctttccgatattctctgatcaatcaggggttcggtgtgactgttttggatttgaaggcagatactgtagcaacagatattgctgataatattgatattatagttatagcagatgtacgtgaagcatatactccggatgagatagctaagatacaacgttttattgctcgtggaggtaacatgattatagcttgcgaaccacggcgtcaaccattgatgaatccattagttgaaaacctgggtgttacatttatgccgggtgttgtagtggaagagacagagggatatgctcccaatcaattatttgtgaatcctactgaaacggctgtagcagagaataagggatattatagaatggccagttttggttctaaactttctatgcctgatgctgtacaacttgtcctgaatgatagttgtggatttaagtcttcagttctgtttgctacaactccaaacgcttggaatgaattgcagacaacagactttatagatgataaacctgtaattaatcaggaaactggtgaaaaagcaggtactattcctttggtggtgtgtttgacacgacaggtaggcgataaagagcagcgtatctatgtatgtggtgatgctgattgtatggctaacagtgaattgactaccaatcgcaatgatttgagtacttctaatttcacattaatcaccgaagccttccgcgaattgtcttataatcaattccccataagcgatgagcgtccccatccgtatgatgataaaatgtctatttccggccagggggctttgatcttcgttcgcattctgtttatgggagttattcccgtagggctattagtcggatacatcatgacttggtggcgtcgtcgtaaaaaataatagttgtaaaagaataggttaaaaacaagttttgtcaaataacaatatataacgaaacacaacacagcatttatgaaaaaaaagcgaagtcttattattggctgcttgctattagcagctttgcttccgtacactttttttgctagtgcacagactaaagttactgttaaagtacaggactatagttatagggtcgtcaaaggtaaagttacagactcggaagggcattctttaccgggggtaaacgtaagagtaaaggaagtacagggaggtacagtttgtgatattgatgggaactttaaacttagtgccccacgtgaagacgccgtactggtattctcttatattggtatggccactcaagaagtaacagtcaaagccagccagaaaaaagagattttggttcaaatgaaagaagacgtgaatgaggtaaatgaagttgtagtgaccggatatgcaactttgagaaaagaaagttttacgggaaatacggtatctattaaaaaggaagatttgcagaaagtttctaaaacgaatgtaatatcggctattcaggtatttgacccttcttttcgcattgcagaaaataatatgtggggatctgaccctaacgccttaccggaagtctatcttcgtggtaaatctggtattgggattaaagaattagatgctacagatgttacctcaaaatcctctttgatgaataatccgaatcttccgacatttattatggatggatttgaaataagtgtgacgaagttgtacgacatggatccttctcgtattgagagtattacgattttgaaagatgctgctgctactgctatgtatggttcacgtgcagctaatggtgtgatagtaattactacagtaactccaaagcctggtaaaataaatgtctcttatagcctgaccggagaagtggaaatgccggatttaagtgattataacttgttgaatgctgctgataaattggaagctgaaagaatatccggatgctttgaagatccaacgggtggtgttgacacagaaaatagatatagagatttctattataaaaaactgtataatgttcttgatggcgttgatacatattggctaaataaaccattacaaacgtcattcaatatgaatcatagtctttatgtcgatggtggttcagataaattgcgttttggtgtagaattgagcctgaacaaaaacaatggtgtaatgaaaggctcgaaacgtgatgtgtggggagcaggcgcatatattcaatatactataggcaatttcatttttcgcaatcattttacttatgatgtcaacagttctaaagattcgccttatggtactttctctgattatacttctcagttgccctatgatgtatatcaggatgagaatggaaatctgttggaaacgctcggatattggggatttaagaccaaccgatacaatcctctttatgaagctacattaggaagctatagtaagtcttcttatgagcaagtaatcaataatttaagtgctcagtggaatataaataattatttattgtttaaaaccacattaggcttaacccgtcaatttaatgagaatgaacgtttcttagatccacattctcagaaaaatgccaatcctttaagtgctactaatctttcttccggggaattaacaactggatctggaaataatttcactcttgactggcaggcatcattagcatacaatcgttttataaataagcataacattaatgtttcagcgggaatgaatgtaatggaaaatcagactaagagtttgactgctaactatagaggttttccgtctggcagcttgcattctcctaattatgcacaggaaatggttaataagccgacacagagtgaggagcattctcgtttggtcggtttgataggcttggtcaattatagttatgataacatctatttgtttgatacaagcgttcgtatggatggctcatctaaatttggttcagacaaaaaatttgctccattctggagttttggtgcagggttgaatattcacaattataaatactttaaagaattgggtgtttttgacttattaaaactgcgtgctagttatggtcaggttggtaaagtgaattttgcctcttatgatgcgaagacaacttatcgtattctttctgaccaatggtataagactggttatggagctgtattatacgcattgggtaataaaggtttgacttgggaaacgacaaatacattggatgtaggtttggaagtcagcttactaaagaatcttctatatttaaaaggtagttattatgttaaacggacagttgactgtattaactccgttactattcctagtcattcaggttttataacttatatggataatattggtgagatcgaaaataaaggattcgaattggatgttcgtgcgaatgttgttcgaactcaggattggaatcttaatttgttcgcaaacttgtctcataataaaaaccgattggtaaaaatcgcagagagtctgaaagcatataatgataaagtggatgattatcttaatgatccaaaacaaagtgctagttctactggctccaaaagctataagaaatattcggaaggggtttcgcagagtgcaatttgggctatgaagtcattgggaattgatccggctactggtgatgagctctttcttaatgcagatggtactgtaactaagtattgggattcatccaatcaagtagtagtgggagatgaagaacctgctgcacgaggaactcttggttttaatctgacttggaaacgttttagtgtttatacaacttttatgtatgagtttggtggacaacgttataacagaactttggcagataaagtagaaggtgttgatattttaaatgaaaatggggataggcggatattaacagaacgttggaaagaacccggggatttggctgcctttaagaaaatacaggcaaatatttatataggaaatgcaacgacaaagccgacttcccgatttgtacaagactataattggattaatttgaattctattacactggaatatgatttcgattcaaaattgattaaacctataggactgagtatgttacggttcagtgtaggggctaatgaattagcacgttggtcctctgttgaactcgaaagaggattgagttatccgtattcaagaacaattaatttctcactaaaagcaagtttctaatgattatgaagcgtatgaaaatatataaacttttaataattttacttctgcttgtcggattaaattcttgcagtggttggctggaccttgagcctaaagatactaccacagaaacggacttgtttcagacgggtgatggctatcgtattgcattaaatggtatttatgaacaaatggctgaaaccagtttgtatgggaaagagttgagctggggatttttggatgtgcttgcacagacatatatgtcctataggttggctaacattacggaataccaggctgctgttaattatatgtatactaatgataaagtaaaatcgcttattgagtctatctggtcaaaagcctataataatatagcaaactgtaataatataattcagcgtattgaatctgagtctgccggaaaatttgcaggtggagagactgaacaaaaaatgatcgaaggagaagccttggcattacgtgcttatcttcattttgatatgttgcgactttttgctccttctatgtttaagaaagatgaacgtcaatatatcccctatgtgaccacgtatccttgtacatttcaaccttactctaccaataaagaagtcttggaaaaagccatagaagatttgaaaagagctaaaatgttggtagaaccttttgacatggctgaaacaaaatggctaattactaaaaaccgtatagaaggggatgagagtccgacagatctgttttatgcctatagaggatatcggatgaattactatgccatcagtgccttattggccagagtgtataattatgccggtatgcatcaggaggcttttgatgaagcaactactgtgatagaagcgaaaggaagtggtggtaaatttttcactatgagtaccagtggtgatgttacaaatggaaatattaagttatacgataatgttatattttgtttgtctaatcagaatttgtggactatttatgagccttattacaatacagatcagagcttggtgttggcagcatgggatataactgatatttttgatgctataaatgatactcgtgctcagctagtgaaattagaaaattcccaaatatacagtatcaaaaatctaccgacacaagcgaaattagcgtcttatgtcaaagatatgattcctatgattcgtttgggtgagatgtattatattcgagctgaatattataatagcaaggaagatgacacaaatgctaaaaatgagttagccatacttcgttctgcttataattgtcctcctgacaagttaactggtgattttgtcgatgagttaattaatgaagtacatcgtgaatatcttggtgaaggacagttgttttattactataaaaaaatgaacaaacgtccgggctatgctatgggtagcgatgatctgtttgttttgccacgtcctgataatgaaaatttgtaaattctagattagcgatatatgaaaaaatacatattaatattgagtgtgcttttcctggcattaagttcatgtgggaaagaagaattggcactgtatgatgtttcaacacactatctctatataccaaatgatgaagacaagcatattacatctatgacctttaaacatcatccggatctgaatgattatgatgccttgtttgaggtaagacttgtcggatcttatttggaggaggataaggcttttacagtggaggttgtagatgatgagacgacagcgcatgcagaagactttacagtggaaaaaacacagatttttcatgctggcgtcttgaaagataacttgaagatcactttgcataaaacaccacatcttgatgaggaaactgtaaaagtaacagttcgcctggttcctaatgagacatttggactggctgattatttgggaactaatgagtatactaaagcgataatggcatccattacttttgataataaactaagtaagccactttggtgggatcagaatattgaagataactttttgggagaatggactgctactaaatattcgtattttatagaaagttgtgatggagaggttcttgatcttactgattatgatgcagatgaaattcggttattggcaatgaagtttaagaaagatattaaggataatgattggcgtgaacctaatggacaatcaataacagttcctgtttattaaaactctaaaattatgaaatgtaagatatttgtgtttttgtgccttatgagcctgttttgttcaggctgctatgaggataaaggaaattatgattataatgatctgttaagagtaacaattatgggtttcttatccgaaaaagatggtgcggaaactgagattacatcaataacagttacagctggacagacaattaaagtacgaccagttctctctttcgagaatgagaatactaaaatgaacttgacttatacttggttgttcaaagacaaagtaataggtaatgaggaaaaactaaatttcactgctactgaagtaatttccggatatgtagttttagatattgaggatttagatacaggtaatcattttcgggctaatttttctttaaaaattttagatccctatgctgcttctggttttttagtacttagtgagagaggaggagaatcttgtttgagcttcttggaaggaacatattttgagaataaaactggatttaatccatatattggactttatcaaaaggagaatgataaaatactaccaagagatgtgtttaaaatacatgaacattttcgtaaaaatagtcatagtacacaaattatggctgtttgtaagaacgatttgatagatattaatgcttatacttttaaagaagaaaatcgggcagctgagatgtttatgtcaggtgtgccgactatttcagatgttatgttcatgcagtgggttgatcttgtagctgatgaacaaggacggctttataaacgagtaaaaagtacaaatgaattatttcactctaatcgttttttaccttctttcgtagaaaatgaagatggtgaagtacttcaaggcattcgttttataccaggtgatataagtaacagtaagaatttgtgtttattatatgatacttataagaaacgttatttgataatttccgactggaaaaattcgtttgggaatactttggggaaagttgtggtggcaaaacatggaagtggagataagggatggtcggaaggctttacccgattggatcatatggagggttataatgtaatttatacaggatgctatctttatcccagagaatatcttaatcccgctgctaacagatatttttctataatagaaaaggatggagtgtattatcatcaacattttagagtgaatcgtgattattcaaccggaaatatgaatgtgacagaagataaacaaggagtgatgtcaggactgggaagtataatacaggagaataatattttctgtataatgagatatgctcaaggatttgattcatctatacacccttatctcttgatatccagtggaaaatcattgtatctgtatgatattacagtgagtagcgctggtagtacttctgaggagattctaaaactttacgagtttgatagtcctatcgttgcgatgaatggagaatgtattagtggcacacaattgggtgtaggtctcgaagatggttcattccatgttttaaatatgactttggccaaagatcatcttatggataaagagaagttacttttttggagtttgccagccgggcagcttggaactataaaggatatacaatacaatgttcaagaacagtcaccgactttcaactaaaatagtataagagaaggagattgtgtttccgaagctttgaatttataaagtccccctcgttacatcataacatcataacgtatgagggggacttttcattttagggatttggcaatcacttctttagtatgccgcccgatacttcccctcctccttatcctccagcatattcagataagaagtataacgagactcactgataagatgcttttccactgcctcacgcaccgcacatcccggctcatgccgatgtgtacagttaccatatttgcaatcagcggaaaccttgaatatttcagggaaataatgcccgatttcttcctcctccatatcgaacgttccgaatcctttgattcccggagtatcgataatatatccatccccgtctacagagaacatttcagagaaggtagtcgtatgcatacctttgttgtgataggtcgatatctcaccggtttttactttggttcccggtaaaatagcgttgatgagcgtcgattttccaactcccgaatgaccggaaaaaagtgtgatcttgccttccaggtcttttttgatggcatccactccggttccttccttggcagaaaccttgaaacaaggataactgatatgcgtatacagattaataagagcgtccagataacggagctcatcctcgttataagcatctaccttattaaataccagtttgacaggtacacgatatgcttcggcagaagcgagaaaacggtcgataaaaatggtggatgtttcgggatagttgacagtaaccactaacatacattgatcgaggttagcggcaagaatgtgagattgtttggaaagattggaagaacggcggatgatgtagttctttctgtcttctatttcattgataaaggcagtaccttcctgattgagtataatctgaacgcggtcgcccacggctaccggattggtgctgcgaataccttttaaccggaaattacctttgattttacattcaataaattgtccgtcgtcggtcttcacctgataccaactgcccgtgttcttgattactaatcccttcatttatttaatggataatggataatggataatggagaatgggcaatgggactgcatagtaattatccattgtccattctccattttccattaaaccgtcatgatttctttatccttgtcagcaagcatatcttcgatctgtttgatatacttatcatggattttttgtaacttggcttccgcattcttctgttcgtcttctgccagtccgtcttttactgcttttttcagtgcgtcgatgccatcgcgacgagcgttgcgtacacttactttggcagtttcgccttccgctttacactgtttagcgagctgtctacgacgttcttccgtcagaggaggaataccaatacggattacttcaccattattttcgggcataatgccaaggtcagagtcgataatggctttttcgatggcacggaacatacttttgtcccacggtttgatggtgatactgcgagcatccggagtggataaagcagctacattgctgataggaaccatgcttccgtaagagtctacgcggataccatccaacagtcgggtactcgcttttccagcgcggatatgtgccaatgcttcttcgagatacattacagccatatccattttttcttgtgcattgtcaaggcaagtctttacgtctaccatattttttgataattaaagttgctatttggttgattgattagcaaaagtatactattttttgcttatctgcaacagcacactcatcttttttataagcgacttgccgatgataatcaatgtaacggcagtgataatcattaaaataccgaccattaatcggggagtcagtttttcgtgaaacaggaggaccccgaaaaataacgctgtcacaggctccaaagcaccgagtatagcagtaggagtggagcctatagattgaatggctaatgcggtgcaaatcaatgacacggcagtggggagaatggccaaagccagaacatctgcccacaataagggagagggtatgatttgcaattccgtgcagaaattcaagcggactatgtaaaccgataatccgaataatatagcataaaaagtcagtttggtagtcggtaatgtttttaatgaagaccggttgattcctacgatataaatggcataggagagagacgacagtaaaacaaagataattcctacggtggagagtggtttgttgccatctccctgatagagcagggcaatgcccgaaagtgccaacaggatcgaaaaaacggtgattgcggaaatcttctctttgaaaaaggcgcccatgatcacagctaccatcaccggataaacgaacagaatggtagaagcaataccggcatccatatagttgtaactcatgaatagaagcagagatgaaaacgaaaacagcaatcccatgattaccaaggggagaatgtctgccttgcgaagagtaaaagactgcccttgcagcttcatcaagacacccaatacaattacggcaaatgcgtaacggtagaataaaacagtatcgacactcatgccggcagcatagagcgggagtgtgaagagaggattcataccgtagcttgcagcggcaatggctccataaataaaacctttggtcttgttattcattattttagcctcttaaaaatggcgtgcaaaagtacgtagtttgccgatgataaacaatagtttagggcgttgatagtataatttaatttttcgtatgcgacggattacttggagaatagcatgagattactcttctgctagccgtaaactaacattgtttatgcttgaatttattcgtctgacagctgttttcttttcgtctgacagctgttagacgaaagattaacagttgtcagacgaaagttcaacaactgtcagacgaatagttttatgcaatgcgagacttagattttagcactatagccattaagaaatagtattgaaagctgtaaatcttagtctttttattatctttgcatcaatgacatgccttgcatcttaatacattagataaatacagaatataaaatatgaaagaaaataaactggattacacccccgaaccgatggacctttcatcggttgaccttcccgaatctttaatccaattatcagagcgcatcgctgaaaatgtacatgaagtgtgggcaaaagcccggatggacgaaggctggacttatggcgaaaaacgcgatgatatccataaaaagcacccttgtctggtgccttatgatgagttgccggaagaagaaaaagagtacgatcggaatacggctatgaatacgatcaagatggtgaagaaattaggtttcagaatagaaagggaggagtaagttatgaatgctcgttggtttgaccggattatttatggcggggcctggaaacagatatgtttcctgattattatagtcatttcgctgattgttctatcttgtctgggagtacactggggaagcaagcatcagatggctccttccgaagagatgactgcgctggctgccgactctgtggcgaaccattctttccagaagaccctgtggaatgtatacaataactttgttgattcgggcaatctgattagtataagtccggaagaccgcccgtgggcattgattattagtttgctgggttccgtcgttttgggcggattgttgatctccacgctttccaatatcattgaaaggcgggtggaaaattgcagaaacgggttgattcattataaactatctgatcattttgtgatcatcggtgcagatgcgatgttgccctgtctgatacgacagttatgccaacgggagaaggattgcacattagtcattcagacttccaaagacgtcaatgaagtacggatggaattattctccaatctcacaaaggacgaggagaagagaatcgttttggttcatgccatgagagactctaaagaagaactgaaaaagttgtatgtggcggatgcgaaagaagtctttatattgggagatagcggagagctggatgatgtggaatattatcatgactcgatgaatgtcgactgtctgaatctgataggcgaactttgcaaggaagagaatcggaaacctcctttgaagtgcaacgtactctttgaatatcaatctacttttgccgtcttccaattctcggatattgatgatgatataaaggaatatattgatttttgtccgtttaacttttacgaaacatgggcgcaaaaagtatttgtgcgaaatgcgtgtagtatccgtgagattaattatctgcctctggattatcagcctgtcacttacgaatcagagaaatatgtgcatctggtaattgtgggaatgtcgaggatgggaattgctctggctgtcgaggctgcccatatagcccactatcctaactttatccgggataaaaagaagaaaacgcgcatcacttttatcgataatgaagcaatgcgtgagatgaacagcttcaaacaggcgtatgaaaacctgtttgatgtatcttattctacctttatagacacagaaaacggtttggtccgcagggatgaacctgctgaggtctatgctcatttgggaacagattttatagacatagaatggcagtttgtacagggaactatcgaatcgccggaggtccgtgatttgattacaggctggtgtgaagatgaggatgcgctgatgacggttgcagtctgtctgaacctgactcatcagtctatttcttctgctgtctatctcccgcgttgtgtctatgagaaaggtgttccggtactggttcagcaacggataacatcggctattattgaaaaattatccggtaatccgttgaagggaaaaggaggaaccaatcagcgtttcaagaatcttcgtccgttcgggatgttggatgattgtttcgacttgtgcatggcagacgagatgtatgccaagcgtgtaaatgcggtgtatgaaaagtgtgaaggagataaagtcttgacagaactgccatctgcgaaagaaatggacgaactatggcacaatccgaagttcaaaacggtaaagaaatggtctaatatttataatgcgaatgccattcctaccaaattgcgttcaatcggctacaccaaggaacattgggacaacggaaagcaacttagcgaaaagcaggtggcgattttggcagaggtggaacacaaccggtggaatgtggaagaactgttactgggatatagacctgtgacaaaaaaggaacaggaagagatagaacaaaaggcagccttgaagaataaaaagcgggatgaagaatatgctcattatgacattcgcccttacaacgatttgcggaatggcagtgagaaatatgatattgctttgacacggcatctgcttttgattgcgaagccggacgaaaaactataaaatggattaggatttgtgatatggggaatcatcaaaaggaaatattcttagtgctctctatctttctgattggctttcagtgcacttgggcacaaaccactcagaaggggatcgtcgtggaaatgagtagtaataacaagcctgtagccggtgctgaaataaaagtagcgggggcttcgcctacggacagcgatcaggaagggcggtttattctgaatttcaccgcttccttgccgggcgatccgttgatgattaatgatatctataagaaaggtttcaaaatagtcaattacgagaaagtagccaactggaatatatcgtctgcctccgaactgaaaattgtattagggcgtaccgaagtcatcaatgcgttgcgcaagaaatattacgatataggcgaatccaatagcgagaaagaatatcggaaaacattggctgaactggaagaactgaagaaacagaacgcattgtccgcagtggaatatgatcagaaagttgactccatgtctaaaagtatgatggaatggcagaaacgtctggaaatatatgcgcttaaatttgcctgcatcaatcgtgacgagcttgatgctatggaaaagcaggcaatggaactgctcgatcatggtgatgtgcatggagctattcgtctttatgaagagatgaaactcgattctgccatgacattgaagattgcagtcagacagaaagccaaagaagatatgaaactgcttcttccatccttagtgaataatttccagttgctgaagcaagccgatgataaagtggcgtgtgactctgttgctcacttgatttatgagatggcgacggatatcaagctgacattaatgtcggtagagtggttctttcagcggaatgacccaagtgaagttctggatcagtatagcttgatcgtaaaggatacgcaaagtatgcaagaaattgagctggtggagaatagccttcagcagtcattgaaagaagtcaaactgaaaggagaactgaagaaaaaggcacagttggttttcgaacgaatcgaagaccgcaagaaatggattagtataaaggaaaaaatatagaaacagatgaagaagatcaagatttttattgcatcatcggcggagttgaatgaagacaaacagatgtttgacttgtacttttcggataagaataaactttatcgtgaccggaatatcgacttcgaccagcgtacgtggatggacttcagcagttcgctgaatgaaggtcgtctgcaggatcgctataatgactatatccgcgaatgtgatattgtgatttttctgttccacacacggatggggcgctataccaaagaagaactggaagtggcccatgaaatatatctgaagactaaggctgcaaaacctaaaatatttgtctatttcaaggaggagggaatcgttgatgagtctctcaaagattttaaatcttattgcgagaagaatctcggacacttctgcgacttgtataccaattatgatgatttgcgtctcaagttcgacaaacaattgcagattttggagaatgaaggctttatcaagcccgatccggtagatgtgaaacggacattgaggttcgtattattgtatgtccttgtgcctgtactggtggtggcactggctttctttgctttctattattattcgccggtcacttccacggtgcgtcttacggatactaccaagtcttctttgcctttttatggcgctgatataacattggagtatgccgataagagcgaaacccgtcatgtggacagactttctgacgaggttgtcttcaaagaaattcatactaaatatctgggtgggaatgcccgtctgaagatagaatcgaaaggatatgtgacagtagatacggtactgagcttggaaaagaatgtgactcttggcatcagtcgggattcttcattggcgatgattttcggtactgtgaaagatgaggataaccgtccgctggcggatgctactgttcaagtgctggacatgaaaacggtatctgacggaatgggaaactttcaactgcccatacctgccgagaaacaaaaagaggagcaacgggtgacggtatacaaggatggatatcaattatgggacttcaccggaccggtatccgataaagtcccatggaagattattctgagaaagtaatgcctttactttctgtaaatgctattattgttgatccggtagtcattgataaggtagagcagaacggcatcgttaggcagcgtgccgctcttatactccagaccagtttttaataattcctcggagccgggctgggataatttggccagaaggtctcctttggcaaaccggacaacaagagggtaggagctgaaaagctgattaagttctttcagttcgtttgcgatgttttccgcctcttgcagaaatttcagagcctccgcattattgctgttctgatagtaggcgatacttgtattgagagtcatcagtagatagttcgtgccaagttgggctttattatgcggatacagtgtcttgatgatttcgtatgctttcttttgtacttccagtgctttggcatattttttaagtttgccgtatcccaacgacaggttattgtaggtagtggtgatactgcccatcatatccacgtcgttcggcttttgtttcaggtgcttttccctgtctttctttactttttccagatgttccactcctaattcatacagtcctccgcagaccattgcggtacctatgctgttctctgttctcaagtcctgaaatccccatactccttgcatggtgtataatgcttccaggtcgatggcggctttcagagctttgtcatgttcggaaagttccaggagcatatcgatatatgatgcctgtgcactgataatctcaagaacaaatcttgccggattcaactggttcagtttttcggcatattggtaagcttgttccacatgcttcctttcttcgggtttgtttccgtttttggagtaatatagaatgtattgtttctcaatattgtacaataatgaggtcttttgttcttcgctgttgattttgaattcgttggctaccttgtcttcaaatgcttttatggtcgtgaggaagttttccggttctgtttctgtgcttacgctgatgtaggcgaagttccataaagcataccagtaggcacgagacaagggacgcatcttatacagtttctcggcttttgccagaatctcttttatactgccggctgccagtttgtaatccgctttctctactgcctgatggaacagggattcctgtcttcctatttcagcttcgagtatggcctcttcattatctcctgcattctttttatttagctcgaataatttctctgacagttcgttgaccttagacacattgccttcctttttgtaaatgtctgtcagcgaactgtatatgttggcaagctgagaactttgaatatttatgaacagctgattgtcgctgtctgctatctcttcactgatttctttgatctggtcttcatagatttcctttgcttctttgaattcgttcatggcttcgtatgtctttcccattgaatagaacgtctgatggtagatagcatagtaatcgcccgaaggcatggagatatttttgttggacaggatttccagtgcgttgatgtcatactccaaggctttgatatagtctttctgatgatgacgtgcaagggtactttttatgttcagtacttgtacgagagatttctcgtcaaatgaaagtttctggcatttgtccagccattccatggtatcactgtcttccagtcctattttctgcagtgcgtatttaaatacgtatgtaaacctgtcgggaagtgcttcggctacgaacttgtaggcatcatttgctttcttctcgttttccattcctccggtcagggcgcagaggtcggcatatcggtacattgtttcggccagtttgtcgatgtcttcctctgcttttgttttctgtgacagcttctctctggcttgagtgataattccggatttattgtatagctcgatggcttcagacagttttccggcattgaccagttccaatacttgcttctcaatggcgttgatgtcatccggatttattctcgcaaacttctcagcgtactgatcgatctgattcataaatgatctggattcctccgccatcgctttcagacggtcgctacgctcctgcagactgattttctgtgctatatatagctggttgatttcttcaatggctttttcttgtttcttcgaaaagtgggcaacggagatggaataatacttgttcttgctttcttctatagtaccttcgggagccatcacaatgctcaacggacgtttttcggatagaatccacccgttgatcatgtctttattcaccagttcatatcctttcttatatacattcggagaagcgatagccattcccggtttctgtttgctgaagttgaactggaaattcccgctggcatccgtatcggtggcaggggcatcggtagctgtcagttgtactcccggtagtggggacttatttgaattaaaaatctgtactgtacctttttgagacatttgtgcgtaagcacttccggatagtaataagaatatccagaaacaggcgtttttggttttcatagcttttatttcttaatgatgtatatgcaagtcaacaaaaggaatgtggagagagaaagtaaccggggctgactaaaaagtctgaaagctgattatatcctttttagtcagtcccgggtatattggcagggagtcaggatcagttgtgtactactgttcctatttcttctccgctgattacttttttgaggtttcctaccgtgtccatgtcaaaaacaacaatcggcaggttgttttccttgcacatacaggtagctgtgaggtccatcactttcagaccacgtttcagtacttcatcgtatgtgatgtcactgaattttgtagctgtagggtctttctccggatcggctgtgtagatgccgtctacgcgggtacctttcagcattacgtctgcttcgatttcgatgccgcgcagtgaagaaccggtgtctgtggtaaagaaaggatttcccgtaccgccggacatgataacgatttcaccgttttccatgcattcaatcgctttccatttgctgtagaattcaccgatcggctccatgcggactgctgtaagtacacgggcctttactccggctgctactaatgcggaacttaatgcaaggctgttgatgacagttgccagcatacccatctgatcacctttcacacggtcgaagcccttgttggctccgcttagtccacggaagatatttccgccgccgataacgatgccgatttgtactccctgttcatggatttctttgatttgtgcggcatattccgccagtcttttttcgtcgatgccgtattgtttttcccccatcaggctttctccgctgagcttcagcagaattcttttatactttgccatatctttttacatttagtttaccgcaaatatagagataatttgttggatagacctcatagttgcgcgataacttttatatcgctttcttcactatttctcttccgatgaaggtctgcacgattcccctcaatgaaaggtaagtgatgaaagccagccataaagcgtgatttcccaagagattatggaaggcatagtagataataaaaaagctgacggaagcaaccaacatcgaataaagcatctggcgggtggcggtggcgccgataaacacaccatcccataagaaagcggagaaacctgtcaatgggatggcaagagcccaataaaagtaagtgtctgaggcgcttattaccgaaacatcattcgtcagtaacccgagaaatccttttccgcctattgcatataaaagggtgaatgctgccgaaagtccgatgccccaatagaaaaggtgattgaccgtgttgcggaggcccgtttgatttcttgcgccgatatagcgtccggctaacgcttcccctgcataggcgaatccatccatgatgtaagagaagagtgtgaacaattgcatcagcagtgtatttactgccaaaacgacttctccctgtgcagctccagcagaggtgaagaacatcgttacgattaccaggcagagggtacggaaaaagatgtcacggtttacccggaagaaacggtacattgcctgcttctgtatgatgtctttccatacaatacgttttcggagcgtgctgtaataacgcatatacaatagtatagccataaagaaacctgcatactgtgcgataagggttccggcggcgactcctgccactttcatatccaagagatagacgaaagacaaactggcgataatattgacaatattctgcgtgatggcaatatacatcgggaagcgtgagttctgcattccgataaaccagcctgcaaatccataaaggcccagtattgccggagctccccaaatacagatatagaaataggtagttgccagttgctttacttcttctgtggtctgtatgagtgtgaacgccgcattaaggataggatattgaaggatcagcaggcatagggcaataaagagtccgacgccgacagaacgtatcagtaaccggttgatctcgtttaagtcatgctgcccgtaggcttgtgaggtcatgccgcttgttcccatacgtaggaatccgaagatccagtagatgatattgaacaacattcctcctacggcaatcgccccgatatatgccggagagccgagatgtcctacgatggtgacatcgataagtcccagcaatggcacggtaatattcgaaataatcgatggtacggcaatctgtaatattcgtctgttttcggaggtcgtctttttatttatcatcttgtagaaacacttttatcaaatagattgttctttttgcgaacaaaggtacatattttattattttattgtatctttgcgtgtcacgaactagaaacaatgtaactgattatgaaaaccttaactctccttcttttttctttgttttcgttgccgctgatgctgaatgcacagacggccgatgaaatgttgcataaagtctcggctgctattgaggccggacagcatggacaggcggttagctatttccgtcaggctatcagtctgaatatagaccgctcggaaatgttctactggacgagtatagacaagagtagtgagatcagctcgaaactttctaatgagttggctcttgcctataagaagaaccggaattatgataaagcctttttattttataaagaactgtcgcagaaggaccctgataatgtagattatctggaggctgttgccgaaatgcaggtatgtcgtggacaggagaaggatgcattgcgtatgtacgagaatatattgaagttggatgcggataatctggcagcgaatatctttctcggtaattattattatctgatggcggagcaggagaagaaaaaactggaaagtgactataagaagctttcttcaccgacaaaaatgcaatatgcacgttatagggatgggttgtcgaaattgtttgctaccggatatgagaaagcacgacgctctttacagaaagtggtgctacggttcccatcgacggaggctcagaagacgttagataagattttaaggatagagaaagaggtgaatcgctgagcggtttgaacagtcgataattaaaacagattagttttttataatggaaggataaattaaaatagatatttgatggttgttgattatttttttgtatgtttgtggagtacaaacaaaatgtatttaacaagtcattaaactctaagtaattattaaccttaaaataatattatgtctagattaggtctgcttttaattttattgctctttttttgtgtgaataggctatttgcctcaattgctgaatgtgcaacaagtattaataaaagtgattcaacatcttatggtgaggtgctacctctaccggatttgcctcctaattatcattcacctataagtacatatgtattggagggatatacaactgcaaaatatagctctagaactagaagaatgcatcggcaatttgctagaaaagcctgtaaatatgcaggattaccatataatagaatttattttgtccgagaatgggaaattaccattaaatttcccaaatcaggtccttcggaaaagtatactcctactccctctgtaaccacttgtgggcttgtggaagataaactatatgtaacatcagaatttggttatgtttatgtagaaccgaaggatggagatccttatcttaagacatatatttatgaagttatacaagatgcacatggacagttttataatgatgtttggatacctagaaaaaaagaaaacttagaatggccttgcgaacgatatacaataacaatgtaataattgaactaatgaagtttatatattatttatgtgcaatggtgttattccccctttgcacgtcttgttctgagaattttaatactttcttgcaagaaagttctttatcagaaataaaagaaatctcctcgtcagagaaacctgttcaagtcaattcgatggatgacgtttttgacctagcacaggcagatggattatttagtcatgtactaaataatacagcacctgcatttataatttcaaagcaggatgttggaacacgtactttaggtgaattgattccaatgtcttatactggatatcaatatttttggagtccggatggattaggtgaatatatttcaagaaagatgtatactttgattctttccgaagaaatggcgaaagaaacaggattgagtccccactatgcttattactgtactctttggggggcacaattaaattatgcttatcctgcagaagctttaactccagctttagactgcttttctccagaatgtggaattactccagattcaaaactaagagaacctccaagaggttataaaacagaattgattataacagagaatgggcaacatgtaatggctatgtggactgtactattaaatatttctgaaagtgatggatttccctatttttatgatgatgtttgggttccgtgtaggaaagaagatattgtatggaattatggcttttattggaaataaattgaaacataatctcatggtgtagaatcataagaagattgtatttgataatttgttatgtatgtataattttacaaataaataatttaataatattgctttattagtcctattcaaatatataaaacaggagttctttaaaaagcaattggaagcttaatctttgcattgtgaatgagtttttgttttcttaacagagtaaaagatattgttaatctagaaagaggtgaaccgctcagcggttcacctctttctagattattattttgcggtgcgaataggcaaatctaatggaccttcaatgacagtacgagtaccactctgtccttttttaggaccaggtattaatggactgtacatcaggacatggcgaattcttgtacgctgatctggagtgaattcattggcataagtaaaagcataatccatgatattggtagaagtaaactctgtttcagtttcacaatttattcgtttggcaagtattggaagatatttttctccattgtcaatctgttcatttacccaaatgtcatacgctactttattatatggataggtatctctacaatagtcggtatcttgacaatcattcagtaaattaccgttctcatcttctgcaaaagcatggtgtaatcctaaataatgtcctaattcatgagctatagtaactgtaacgtctgctgtgttatgtatcgtttcagtagattgtgaattaataaacagactatttatagatgtacaataagggaattttaagtttttcagttctagataagaataatttatttcattaagcccttctagaaaagtacttccttttgtggagaatggaagatgggaaattcctaatattgttgagttagaatgagggtcggattcaaaattgtatatcataacattaatatacagattaggatcccacagataatctacatatttccctgaattgtcttgcatgaatttctcacagtctattggataggtttccggccattctacatattctatacctggtgctgccaattgttttccagatggagcaacagttgcaaggctgaaagtgaggttcatgtccacactgtttactgtatttttatataagttgttaactatatcaagtatgctagataatcgtttagaactgacgtattgtaaaggatcattttgatctttatataaaacgtgaaaaataataggaagattataatgatgctcttctgcagtactgctagaagcttcttgagttatttggattgttttagttactttgttacttataattgtaactgtagcacttcttggatttgagtccaggctagctgttatagatagagtcagttctccatcattctcgccattctttttattaggtacacaccactgcttgttgctcgaaacactccatgaggaattacaggtcacatctatttttaatgtctcgccatttgcgctaacatcatcgaaagttgattgcgataattccagtttcgctgtttctgaatcagaatcgccacaactaataaggaaaaatagtaatggaagtaggaagattaatcttgttttcataaataagcgagtttttatagtatatataaacgtatggctcaaagataatgttttttgaaacaatagaggcttttatttaaagatgtattctacctctttaaacatatatcctctttttctctgcgcatcatcttccagaatcagcttcccttcgggttctacgcaaataattctcgcaaagaactctccatcagcatctttataccgatgcatcccttcttttctgaaaagagctttttcatatcgatgccctatgagttcagtgtcaccgttccggagcaattcataatcggattgaatgcggagcatgatattcttgagaatttcgaaaatgtcatactgttttcctgtgatttgccggagcgataccggatttggagcagtactatggaatgcttcctgatttacattgatcccgattccggaaatactctgactgatattgcgccccatcaaatcattttcaatcagcattccacatatttttttgtctttccagtagatatcattcggccatttgatggaaaaatcgtcagcatagctatccagttcctctttaatagccaaagacacaatctgagagatcaagaactgccggcgtgcttccaaaaaatctgggaaaaggacaaagctgaaaagaagattctttttgggttcagattcccacgaattgccacgttgcccacgtccggatgtctggaagtcggcaactacagtcgtaaatgctgcaactccctgttgcttggcacaaagagtctgcagataactgtttgtagagtttgtctcactgatgtgaatcaatgggacagaaaatgacatatcaggggagggcatcatattcagcacgcagtttcttagtgaatttcttgataacttcctcataagaatgatcgacgagttcctttattaatttatcgtctacgtctttatcgaagtaaacgccattccaatatttcttgttgaaatggtaggctccttcaatgcctgcataatgttcgcgcagttcgatggcacgttccggatcacatttcagtgcgatgaagttggctccttccaagtcgatgagggcaaacattttgtccatcaccttcataaccagcgatacatcatcaaacgggaatgattcggtaaccccttttttacttaagcagtattccctgatcgtttctacattcataagtctttcgattttatgtttttgctcttagttaaaatacttgtttcctattaaaataaaggaggataaaaagcttcctttatatggtctattctgaaatttccgttctcgccaatgacagtgatgatatcgaaacgtaccggaacgtcaatctgaaatagtttcatatatgtgtcggcagcacgtactgtccgtttaatctttggtaaatcgacggcttcttccggttgggcaaacaaagtgttactgcgtgttttcacttctactatcaccaattcattctctttggcggctacgatgtccagttcgaagtgaccttttctccagtttcggtggcggataagataaccatgctcttcgagataggctactgcggcattttctcctgctttccctaattcattgtgttcagccatctttttttgcaaatttacagcttttattctttgtttttacagaagtaaaagtaattttgcagaagatatgagaaaaaggagcaaaaagtgcctgaaaatgcacgctgagtataccaaacgggaacggcggatgagcattttgttgagcgaagacgagcagctgattgtcgatcgttatctggaaaaatacaagataacgaataagtcacgctggcttcgcgaaaccattctcatgtttatccataaaaatatggaagaagattatcccaccctcttcggagaacatgacatgagacgctgatgatgacgctggacgatacttacttcatgaaacaggcattgatagaagccggcaaggctgcagagcggggcgaagtccctgtaggggcagtggttgtctgcaaagaacgaatcatagcccgtgcccataacctgacagagacattgaatgatgtgacggcccatgccgaaatgcaggctatcactgctgccgccaacgtacttggcggaaagtacctgaacgagtgtacgctgtatgttacagtagaaccctgtgtgatgtgtgccggtgccattgcttgggcgcagaccggcaaactggtttttggtgcggaagatgataagcgtgggtatcagcgatatgcggctcaggcgctgcatcctaaaacggtcgttgtaaaaggaatccttgcagatgaatgtgccacattgatgaaggactttttcgcttctaagagaagatgaaacagtgattagtaaactgctggctacacgttactaaccactttctatattatattattttacttcctcgaaatccacatattcaccatcatcctgagtgaatattttcttatgtttggtttttgggctgttttcagcgaagatttcctcttcgttatcggcacggctgtccgtgttctggttatagctgggacgatgttgctgctggccgttttgtccactccttgcctgcttcgtccgggaagacgaaccacggccaagcccgaaaatggctcttaatacaaatccgacaatcgaaaggccaaatatgacaatggcagctagaaaaagaagtaagaataaaagtatatgcattgggctatgattttatgttgtaacttcgataaaactcatagtacaacaaacgtgccaagagattgtttatttactttttcttgtaaaaagtgaaagtaaaatataccagacaatgatcgctgcgaaactgctgatacctaagaaaacaaggaatgggatacatacaatcaggaaaatgaaactgattttatttgtactccatgaaagattcttgaatttcaacgagaacatcggtatctctgacaccagcaaccacgaaaacagacaaaccaataaaataaggtagacaggatggcagttctcggagacgaggaagtcatgcgcccctactacgaaagatccccagaataaggcgtttgccggaacaggaagaccaacgaaagaactggactgccgggtatcattattgaatttagccagtcgtaacgctgagaatacggaaatcaaaaaggctgcgtatggcaggtaaggagcaagaaattccatatttgccggatagtacatctctttaaataaggagaatacaatcagcgagggagccacaccgaagctgacatcatccgcaagtgaatccaagtcttttccgatgattgagtgtgcattgagaatgcgagccagcatgccatcgaaaaaatcgaagactgcactcagaacaataaaaagcagtgccaggtcataacgggcttcgaaagccatgacacaggcgatacaaccggagaaaaggttcaggcaggttactgtattcggaatattgttctttataacatttgtcattgtgaccgaattatttaagtttggcgataaccgtctggttaccggtcgttaattgtcccatgttgacacagacttccgtgccgaggggcagatatacatccacacgggaaccgaatttgataaagcccatgtgttcgtcgatatagcattcttctcctacttctgcgtaggtgacaatgcgtcgtgccacggctccggcgatttgtcgggtcagcacttccactccttccggagtttctatgactacggtagaacgttcgttctccgtactggctttaggcagccacgctttcatgaagttaccgttgtggtgggctacctttttaatggtgccgtccaccggataccagttggcatgtacgttaacgatgctcatgaagatagagatcatcaaccggcggtcatggaagtattcgttttcgtccacttcttcaatgactacgattttgccgtcagcaggagcgacgactatcttttctgtatccttcccgaaaagtcggatcggacagcggaagaagttaaccatcagcagatatactgcaatactggctactgcaaccacataaaaaggaattttgcaatctattccccaataaagggccgcattaatcagtagcagtagcagaaagctagcccataatatatgtgttccttcgcggtgaatacgtatcttttttaatttctttagtcggcccatgaatgctgtttaatgatattgtgtgcaaaaatatacttattttaaaaaaacagcaagtaaatgagcagagaaatgcgagtgttgataactttttgaggattatttttgtttataacgcgggaggtagtaattttatgccttcaaattaactacttatcattatgcaggatttcgttcatttacacgttcatacgcaatattctcttctggatggtcaggcaagtgtcgcccgtctggtagataaagccatgaaaaatgggatgaagggtattgccgtgaccgatcatggaaatatgttcggcatcaaggaatttacgaactatgtcaataagaagaatagcggtccgaaaggggaaatcaaggatctgaaaaagcggattgcagggattgaagccggcacagtggagtgtgaggataaggaggcggagatagctgcctgcaaggcgaagatcgtggaggcggagaacaagctctttaaaccgattatcggttgcgagatgtacgtcgcccgccgtacgatggacttgaaagaagggaagccggaccaaagcggctatcacctgattgtactagccaagaatgagaaaggttatcataaccttattaaattagtatcgcacgcgtggacgcgcgggtactatatgcgtccgcgtaccgaccgcagtgagctggagaagtatcacgaaggtctgattgtctgctcggcgtgtctgggtggcgaggtgccgaagcgtattaccgcagggcagtttgccgaagccgaagaagcgatccaatggtataagaacctgtttggtgatgactactatctggaaatgcagcgccataaggcgactgtaccccgtgccaatcacgaatgttatccgctacaggtaaatgtgaacaaatacttgcaggagtatgcccggaagtataatatcaagctgatctgcaccaatgacgtccactttgtggatgaagagaatgccgaggcacacgaccgtttgatctgcctgagtacgggtaaagacttggatgaccccagccgtatgctatataccaaacaggaatggatgaagactcgtgaagagatgaatgaactctttgcagatgttcccgaggcactgagcaatacgctggaaattctcgataaagtcgaatattattcgattgaccatgcacctatcatgcctaccttcgctattcccgaagatttcggaacggaagaaggatatcgtgccaaatatacggagaaagacctgttcgacgagtttacgcaggacgaacatggcaatgtggtgctgagcgaagaggaagggcaggccaagatcaaacgtttgggaggatatgacaaactgtatcgtatcaaacttgaaggcgattatctggcaaagttagcatttgacggtgcgaaaagaatatatggtgaccctttgtcggaagaagtgaaagaacggctcaacttcgagttgtacatcatgaaaacgatgggtttccccggatacttcttgattgtgcaggactttatcaacgccgcacgtgtggaactgggcgtatcggtaggtcccggacgtggttcggctgccggttcggcggtggcttactgtctgggtatcaccaagatcgaccctattcagtacgacttgctgttcgagcgtttcttgaatccggaccgtatctccttgcccgatatcgatgtggacttcgatgacgacggtcgtggtgaagtgcttcgctgggtaaccaataaatatggtcaggaaaaagtagcgcatatcatcacatatggtacgatggctaccaaactggctatcaaagacgttgcccgtgtacagaaacttcctctctcggagtccgaccgtctggcaaagctggtgccggataaaatccccgacaagaagctgaacctgcggaatgccatcgaatacgtccccgaactgcaagcggctgaggcatcgtccgacccgttggtgcgggacacccttaagtatgccaaaatgcttgaaggtaacgttcgtggtaccggtgtgcatgcctgcggtacgattatctgtcgtgacgacatcaccgactgggtgccagtaagtacggccgatgataaggaaacgggcgaaaagatgctcgttacccagtatgaaggttcggtgatcgaggataccggattgatcaagatggacttcctcggattgaaaacattgtctattattaaggaggcggttgagaatatccgtctgagtcgtagtctggagatagacgtagaccagatcgatatcaccgatccggcaacttacaaattatatagtgacggacgtaccatcggaacattccagtttgaatctgccggaatgcagaagtacctgcgcgaattgcagccttctaccttcgaagatttgattgccatgaatgccctctatcgtccgggtccgatggattatattccggacttcatcgaccgtaagcatggccgtaagccgattgaatatgacattccggtgatggagaaatatctgaaagatacgtatggcattacggtctatcaggaacaggtgatgcttttgtcacgtctgctggcggactttacccgtggtgagtccgatgcccttcgtaaggcgatgggtaagaagttgcgtgataagctggatcatatgaagcccaagtttatcgaaggcggacgcaagaacggtcatgacccgaaagtacttgaaaagatttggaccgactgggaaaagtttgcctcttatgcgttcaacaaatcgcacgctacttgctactcttgggtggcttatcagacagcctatctgaaagcgaactacccgtcggaatacatggcggctgtcatgagccgaagtttgtccaacattaccgatatcacgaagctgatggacgaatgcaaggcaatgggtatccagacgctcggtccggatgtgaatgagagtaacctgaagtttacggtcaaccacgacggtaatatccgtttcggactgggagcggtgaaaggcgtaggcgaagctgccgtgcaaagcattgtagaagaacgtaataccaacggaccattcaaaggtatctttgatttcgtacaacgtgtcaatctgaatgcctgcaataaaaagaatatggaatgtctggcgttggcgggaggtttcgacagtttccccgaattgaagcgggagcagtactttgccgtcaactctaagggtgaagtattcctcgaaaccttaatgcgatacggtaaccgctatcaggaagacaaaagagctgccatcaattcattgttcggcggagcgaatgtcgtcgatatcgccacccccgaaatacctcagggagtagagcgctggggcgacctcgaacgtctgaacaaggaacgcgacttggtaggtatctacctttccgcccatccgctggatgagttcgcgattgtgctggatcacgtctgcaatacccgtatggcagatttggaagataaggcggctttggcaggccgggagattacaatgggtggcattgtgaccagtgtccgtcgtggagtcagcaagaatggcaatccgtatggcattgccaagatcgaagattattcgggctctacggaaatacctttctggggaaatgactgggtgacttatcagggatatctgaatgaaggcacgttcctgtatatcaaagcccgttgtcaggccaagcaatggcggcaggacgaactggaagtcaagatcacttcaatggaacttctgcccgatgtgaaagaagaactggtgcagaagatcaccattatcattcctctgtcagtgttaaattcgggacttattaccgagctggcgactttgaccaaagaacatcccggcaatacggaactttacttcaaggtgacggatgatacggacagccgtatgtcggtcgatctgatttcccgtccggtcaagctttcggtaggcagagatttaataacatatttaaaggagcgccccgaacttggattccgtataaattgattatctttgtagcgcaaatctacaaacgaagtaatacataataattaatacttaatacttaaaaagaaatggctttagaaattacagacagcaactataaggaaatccttgcagaaggaaagcctgttgtggtggatttttgggctccctggtgtggcccttgtaaaatggtggctcctattattgaagaattggccgcggagtttgaaggacaagtcatcatcggtaaatgcgatgtggatgataacagcgatgtggctgccgaatacggtatccgcaacattcctactgttttgttcttcaagaatggtgagattgtagacaagcaggtaggcgcagtcgccaaaccggtattcgtggaaaaagtgaagaaccttctctagactttgtctaatatttaatacttattacttaatacttacaaccatgggactggaagatgattttttattagaagatgccgatgacgaaaagaccgtcgagtttatcaagaactatctgcctcaggaactgaaagagaagttcgaggacgatgaactgtactattttctcgatctgatagacgagtactattcagaaagtggcattcttgacgctcagcccgataacgacggctacgtaaacattgacttggaagaggtcgtagcttacatcgtgaaagaagccaagaaggacgaaatgggagaatatgatcccgaagaaatcctttttgtggttcagggagaaatggaatatggaaactctctggggcaggtggactaattgtcgctagtcaccactgtagataaatgaaaggaatatagcctgaaagattcgcgtctttcaggctatttctttttccatccttatgttttcgctttccggtatttcctgtcaagtaaattggcagtacctttgttctatagttttaaataaaacactttatgaagtacaacgaatcaattataattagagaatatctgccaacagataaagatgctataatgagtttaatcaagctgaatactcccgattttttcgcagaagaggaggcgaatgatttaagcaaatatttggatgaagaaatagaacaatactatgttttactcgttgatggagaaatcgttgggtgtggaggaataaattttgcagaaaacggcactatagggaaaataagttgggatatgatacatcccgcctttcaaggtaaatcattaggaacaaagctgttgaaacatagaattgaagtgctggaatctatctccagtgttgaaaagataaccgttaggacttcacaagtagcctatagattctatgaaaaacaagggtttgttttgaatgacattaaaaagaattattgggcggaaggatttgatatgtacagtatggagtataagagaatattaaaaagcaaccacaaagcttttattaatccgtaatttccattgctgtaaaattcagtctatgttcctcagaatacactgtacctgctatctacttattttattaaatacccatgtgggaaataatttcggggctttcagatttttagtatctttgttcgttgttttattgcgtatcactaaggtctgataattgaagcacattggtgcttcaattgttgcacctaggtaactctttcgttgcacctaagtgcaacgaaagaaaataaccaagcaaacgactaattgcttaaatagtaaccgataagttattaacagccaaacataaaattattcttatgagcatttattacgacctttatgagaatccggataaagagggtaccgaagaacagaagttgctgcatgcacgggtagtgccaagcggaacatatacaaccaaagagtttgtggagcgggtatccatgatgcaccatattcctcatgcacaattagttggagcagtggaagctatcaccgacgagttgcagacgctgttgtccagaggatatattgtggagtttggagatttggggtatttttctctgaccctctctttggagaaagaaatcactgacagaaaagaagtgcgctctccatctgtccatctgaaaaatatcaaattaaaggtaaagcaaacatataagagagaactgaactctaaaatggatttagaacgaatatcttcccctacgcgttccaatatgaacatatcagaagaagaatgtctgaaaagattgcaggactttctggagaaacatccttgtatcaatcgggcagattattgtgctatcaccggaatgaataaaacacaggctatacggcaattgaatcttttcattgaaaagggagttattcagaaatatgggattgggaaaacggtagtgtatatacgtgttgtgtaaattcttattttagatttcctccaacgcataatactgataatcccgaagtaccgtttgaagaaacttctcctgattattctctcgtggagtaacagataagatttcctgcacctttttggcgagtaacgtaacgcgccttacccgatccttttcaccggactccagcgttcgggtgattacgttcacctgttccaatgataaatcagcagattgtggatacgtcggatgataattctttgtcagatagtcaaattcatcgaggctgacgtgtatcttgcgataattcttctctttgatcaccatcgttccggctgctaaatcacccagtctctgactgtttttagtcagcagaacgactaaaagccctaaaccacccgtgccgggaccgtcaatgatgaagagaagccagcgcaacagataagcactgatgctgggagtagaaccgtctgattttacgacgcgtatattcatcagacgttttccgaaactctgcccgtgattgaacatttcgcagaggaacgagtaaagaagtacaggcaaataaacgaggcacagaaaaaagaccgtaccgactccggaagataaatgcagtttaacaatgagtgttgtcacagaatatagataaatcacaatcagggaataatcgatgaccaaagccagcaatcgttcgccgatactggcgggcgtttggctgattcgaacaaactgaccggtaataatcgtagattctgccattcttggttaaacatttttagatttaagttgcaaatatatcataattcttttacttttgcttccggtttcggacaaaacttatccgaaatctctgaaaagcatgaaggaagttacgtttatccgtcggaacattgaaaaatggaaagggaccgaaaaggtggtggaacaggctgcaaacctgtcccctgaccaacttgccgacgcctatacggaactgactgccgacctggcttttgcacagacccatttcccgacttcccgcattaccatttatttgaataatctcgcttcagccctgcataatgaaatctatcggagcaagcgtgagaaatggacacgcgttatcaccttctggacacgggaagtgccgcagaccatgcatgatgcgcggcgtgagttactgatctcttttatcatctttgccgtcagtgcgttgatcggagcagtatctgccgccaatgatcaggagtttgtgcgtttgataatgggcaaccaatatgtagatatgacattggacaatattgccagaggtgagccgatggcagtatacaacggttctcccgaagctccgatgtttttgggcattacaatcaataatataagagtgtccttcctgtgttttgccgcggggatactgaccagttttggtacggggcttatacttcttcagaatggaattatgctcggttcatttcagatgttcttttatcagcacgacctgctttgggagtcggcacttgccgtctggctgcatggaactcttgaaatatgggcgatcatcgtagccggtgctgccggacttgctttgggcaacagctggttgtttcccggcacctattcgagactcgaatcttttcgcagaggagcgaaaagagggctgaagattgtaatcggtacggtgcccgtgtttatcatggcgggatttatcgaaggctttatcacccgtcacaccgaacttccggatatgctgaggctcggcatcatccttacatcccttgcatttatcatcttttactatatttatttaccaaatagaaaaaaacatggaatcacagaaacctaaggttgcaatgtacgtgaaacgttctttcggtgataagttgaacgcttcttttgacttcataaaagagaattggaaaatactgttgaagtttacgacttatctgcttttgcctgtaagccttattcaggcattaagtttgaacggactgatgggaggagcgtttgccatgactgctatgtccaagactgcgacggtgccggatactgcatctttattgggatttatgtcctattacggtctgtatatgattgtatttatgataggcagtattttgctgacctccatgatctatgcattgatccgtacttataatgaacgtgaagaacgcttggagggaatcacgttgggcattttgaagcctttattgttccgcaatatcaagagactgcttgtaatgacccttttctccatcttagtcatgcttttggtggggcttgtggtaggtctgctggcgtttctgtcactattcaccttgtttctgaccattccgcttcttatcgcttttgtagtgccgcttgcattatgggcacctatctacctgtttgaagatattacagtgatggagtctttcaaaaagacattccggctgggctttgccacttggggaggcgtcttcttgatatctctgatcatgggatttatagctaatgtattgcagggagtgactatgatgccgtggtatatcgctacgctggtgaaatatttcttctcattaagtgatgtcggaagcgagacgacagtatcggcaggatatagctttatcctttatctgcttggtattgtacaggcattcggcgcttatctttccatgattttcacttttgtcggaatggcctaccagtacggtcacgcttccgaagtggtagatagtgtaactgtagagagcgatattgataatttcgataacctctaaacatatataattcagaatagatgctgacatccccggctgatacattggtttgcgacaccgtgcagattgccaaatggcaatccgaatcggcgtatgactacaaccgtgaactgataactcctgaaattaatatctttgaatggtttcgcaggcagtttggggaattgttgcggaagatattcggcagccgttttgccgaagagtattccgaacttatattaatatgtctggccattattattctgctcctgattatatggtttgtttataagaagcgtccggagttattcatgcgttcgtccaagaataaactgccttatgaagtggaggaagatacgatttacggtgtggatttttcgggagggattgccgatgcgctttcccgttccgattatcgggaggcggtgcgcctgctttatttgcagacattgaaacggcttagcgacgagaaacgcattgactggcagccttataaaacaccgacacagtatatcaatgaagtacggatacccgttttccgtcagttgaccaatcatttcctgagggttcgttacggtaactttgagggtacggaggaactgttcaattccatgaaatccttgcaggaagaaatcgggaaaggagggggctcatgaggggaagccgctggtttatcttctttgtccttgcttttctgctgctgatgtttgccatagaatatcatctgccgaagaaatttgtatgggtgcctacctttagccattacgatgagcagcctttcggatgcgctgtgttcgacagtctgctgactgtttcactgccttcgggatatacactgtcccgaaagactttttatcagatggaacaggaagatactgttcacaacaaaggaatactgctgattgccactaatttacctttcggacgggtggatatagaagccttgctcaaaatggcggatcggggaaataagatcatgctggtaagcagttcttttaccaagattctggaggatacgctgaagtttgattgtacttattcttatttcaggtcggtcgatctgaaaaaatatgccgcttcgttattaaagcgggacagtatttattggatcggtgatccggaagtttattcacggcaggtgttccgtttttatccgcagttctgcaagtcctatttccgccgttatgattcgctgccggtacgtaaactggcggaggtcaatctggcaagcgatatggggcacgcattggatgaactggattctacgaccgtttcccgcaattatcatccgttggtggctatggtgcgtccgtggggaaagggtgaaatcattctggtttctactcctttgctttttaccaattacggagtgctggatgagaaaaatgcgacttacatattccgcatcctgtcgcagatgggagagttgcctattgtccgcaccgaaggatatatgaaggagactgcacagacgcagcgatctcctttgcgttattttctgtcgcaaaggccgcttcgctgggcgatctatctgtcgatgttcgctatcttgctctttatggtgtttacagcacggaggcggcaacgggcaatacctgtcatacaggaaccggaaaacaaatcccttgaatttaccaagttgataggcacgctttattatcagaagaatgaccatgccaatctggttcataagaagttcacctactttgcggaagtgctgagaagagaaattcaggtagatgtggaggaagtagcagacgatgaacgttctttccaccggatcgcccagaagacggggatggaggtggaagaaatcagcaggttaatccgcgaaatcagaccggtgatttatggaggacgtgttctttccggcgaagaaatgaagggatttattgataaaatgaatgaaataatcaatcatatttaaagaagatatttatggaagagaatatagaacaacgagtggatttaactctcttttccgagaagatacaggaattgaaggatcagattgcttccgttattgttggtcaggaacagacggtggacttagtgctggcagccatcctagccaatggtcacgtactgatagaaggcgtgccgggagttgcaaagacattgcttgcccgattgacggctcgtctgatcgatgcggacttcagccgtatccagtttacgccggacctgatgccgagcgacgtattgggtaccactgtgttcaatatgaaaaccaatgattttgactttcatcagggaccgatctttgccgatatcgtattggtggacgagatcaaccgtgctcctgccaaaacgcaggctgccttgttcgaggtgatggaagaacgtcagataagcattgacggcattactcataagatgggtgaactctacaccatccttgccacacagaaccctgtggaacaggaaggaacttataaacttcccgaagcgcagctcgaccgctttctgatgaaaataacgatggactatccttcgctggaagaagaagtggatattctggaacgtcaccatacgaacacttcattaatcaggctggacgatatcaagcctgctatcactaaagaagaacttctgtcactgcgtgccttcatgaatcaggtatttgtagaccgtacgctgctccaatacattgcattgattgtgcagcagacgcgtaccagcaaagctgtatatcttggcgcttctccgcgtgcatcagttgcaatgttgcaagcctccaaggcgtatgcccttttgcagggacgtgacttcgtgacaccggaagatattaagttcgttgctccgtatgtgcttcagcatcgtctgatcctgacggcggaagcggaaatggaaggatattctccggtaaaggttacgcaacgtctgattgataaagtagaggtccccaaataagaaccgaatctctataattcgtaactcaaaacttaaaactcaaaactcagaacccgaaattgtacttaacccgtcgtttctatattgcccttattctggttatcctcttattgggtagcggatatctgtttgctccgttttttgtcatcgggcagtgggcgctttttgccttattcgtgttggtatcggcagacggatatattctctaccgtacccaggggattcaggcattccgtcgatgttccgaccgtttctccaatggcgatgacaatgaagtgagcattcgtgtcgaaagtacttattcgcgtcctctctctctggagatcatagatgaaataccttttatcttccagaatcgggatgtctgtttccggaccacccttcagccgaacgaggggaaaacaatcagttaccatcttcgtccgacccgtcgcggagtatattctttcgggcaaatccgtgtatttgtgaccgacaagatcgggctgctttcccgtcggtacacttgtgggcaggcgcaggatatcaaggtatatccttcctatctgatgcttcaccgatacgaattgctggcaatgagtgataatcttaccgaactgggtatcaagcgtatccgccgggtaggccatcaaacggaatttgagcagatcaaggaatatgtaaagggagacgactaccggactatcaactggaaagcgagtgcccgccggcatgaactgatggtaaatgtctatcaggacgaacgctctcagcagatttacagtgtgatagataaaggcagggtgatgcagcaggcttttcggggaatgactttgctcgattatgcgattaacgcttcgctggtgctttcgtatgtggcgatgcggaaagaggataaagcggggctggtgacttttgacgagcattttgataccttcgttccggcttccaagcagcccggacatatgcagacgctgcttgaaaagctgtatagccagcagactacttttggtgaaacggacttctcggctctttgtgtgcatctgaacaagcacgtcaataagcgtagctttttggttctgtataccaactttgccagtatcagcagcatgaatcgccagttggcttacttgcagcagctcaaccggcaacatcgtttgctggtggttttctttgaggatgctgacttgaaagcgtacatcgaaagtccggcgagggatacggaagattattaccggcacgtgattgccgaaaagtttgcttttgagaagcgactgatcgtttctacattaaagcagcatggcatttactctctgctgacgacacccgaaaatctgtcgattgacgtaatcaataaatatctggagatgaaatcacggcaactgctatgataagtctttaataatattttctactgtttcttttaaaggaggaaggtgctttgttatgactacccatataatctcatagtcaatgttggcatattcatgggaaataatatttctgagtccaataacttttgcccatggaacttgtggataatctttgaaaaatgatctttgggttttatcatcaatagccttaattgtttctccgattacctgtattcgcatgatgcaggcatccaaaacagtcattccccaaggggataacaagaaatcgtctacattctgtatattcttgcatctgtcttcaatgatagagattgattctgataattgaagaaacttatctagaatttcctctttaagcgtagattccatctttttctattctttgggatatgagtgaacgaaggtttttgcgtaaacggaggagatctattttgcaattacagatatgctccagttcttctttaatatcgaacatcacgaaaggatcgggttctttcaattctacgaaaacatctaaatcacttccttcgtgttgttcaccacgggccacagaaccaaagataccgatagaaataatcccatatttctcggcacactgttgcttgaattggcggatttttgtaaggtattcattcgttgttttcataattacatacttctttctctacaaaaatagtaaaaaacgggaagataacaagcgcatttctttgaaaatagtttattatagaattgccttccgtgtttctacaaagaagaatacagccattcctattataatgactcccagtatgccgtaaaagagccgtgctctgccgcgacctacattccggacgattgtctgggcattgcgtgtggtgaagaaccagttccagttcagtaaggaagctagcagggaagtgattcccgctagcgcaaaaattccttgtacgatgtattgtccggtcatagtctgatcactctgcttccgtcttccagttcttcaatcgtcacttttacggcatctcccggcagtaattcttctaccagttccggccattcgataaagcaaagggcgccgctgtagaaataatcttcgtatcccatgtcatatacttcacttagctttttgatgcggtaaaaatcgaagtgataaatcaattctccggtttcgtccgaacgatattcgttaacgatagcgaaagtaggagaactgataacgtctgatacacctaattcttcgcaaagagctttgacgaaggtcgttttgccggctcccattttaccatataaagcgaaaacggtgttatcacccatagcagcgataaattcccgggctgcctcatggatactttcctgtgattgaatcttgatttccatatactattctattattatgactgtttcttgcaacaactctttccgatcttgcaaacggcataaatcaggatagagaagaatataatcgaagcgcccgaagggactttccagtggtaagaaataaacagaccgcccagacatcccagaaaaccgataccgatggacagccagatgattttcttgaaactgtaggtaaagaggttggctgtcatttgcggaatggtgagtagcgatattgcgagaacgatgcctaccatacgcagacaagcgacgatggtcaacgcaataaacatcatcagcacatattcgaatatctctaccggaatcttttgcgaacgggcaaactcgcggtcgaatgcaatatatacgataggacggataaacagataaaagaagccggttaatatcatagccaatatgcccagcatccacaagtccgcctgattgatggtcaggatattaccgaaaagataagctgacaagtccggagcaaatcccggtgacaggaaactgaacatgattcccaaagccattcccagcgtccagaatacggcaatcgcagaatcttcgcgcatatctttccgtcggctcagccactcgacaccgaatgcggacaatacagagaagacggcggctgacagtatgggagaaattcccgcaaacagtcccagtcctatccctccgaaagaggcgtgcgtgattcctccactgataaataccagacggcgggtaacaatgtaagtaccgataatcccgcaggcaatgcttgccagtaagctgcccagcaaagcgtgttggaagaatgtatatcgaagtagatccactttttaattaaagattaaagattgaaaattaaaaatcaaagcaagaataatgccgtccatcaataaaaacaacttcaacgccctcctaatacctattacttaatacctattacctctccccattccttctctctccgataatcagaaagacttcatctttgaggtcatccggcaactcgataccccgtagttgcaaactacgtacccagcctgcgacatcaatgtcctgcatggtatataacacatccctgaattggtttgtttcttcgtcagtatacgcatttgcttcctttccgatgaactgatccagttcttcgtcatcgtaatattcaatttttttgcttacggcggcaagcaaactatctttctcgcacacttcgtgttgtccgcagcattctatatctgcttctttcacttccggcatacggtccagttcacctttttctattttctgttgcagtcttttgttgcggatataaccggctatcaatgcgatgatacctagcaacaccaaacttataataagtatccacatagtctgtactgattcaaatttctgcaaagttacttattaatttgcattctatcatggatggtatctatttcttttcttacttttgcacgttgctaacttaaatatatattagacgatgaagcataagaagtggttgactgtcttatttatacacggtaacaggagaagatatcaggtaagtatatgggcggaaggaaatggctgggtgatagaaaaaggtgcggattaaagaaagaaacagccggaactgtagggtaccgacaaaggtgattttcatctgcttaggcggttatttaaaataatcctgtatatttgtgataataaatcgaaagactatgatacgacgtaggctttgcctcttattcctactgactggaatgactctgtttgcttattcgcaaggattgttgtttcaggctaatgataaagaaattaaagaaaggacttctcttcagatatttcaggaaggggagataccttgttttacgaaaaactttcagttgagctttgaactttctattcgcgattttgatacttttggatatgtttttctgctgaaggaagatcaggggaaaactaaatatagctttacgtatacttatctggatggtgagaacagtacattcaagtttaataccgacggaaaagagaatcattattctttaaatctgcgcaatgatgcactggcttatcaatggattcctgtgtcttttgcattcgatttgcaacaggacgtacttacgattcgtatcggagataacgaaaagaagattacttctttaggattgaaagatactttttgtccgcacctcttcttcggacgttatgattatattttggatatgcccacttttgccatccgcaatctgaagctggaaggtgatagaagtcattcatatactttccctctgaatgaaaatgaaggggaagaagtgcatacttctacagggaaggttttgggtacggttgtcaatccggtgtggctcatcaacggttcttatcattgggagaaactttttgagtattcttttcagactccttcgggaatcacttttgagccggacagtcagcgactgattattttcagccaggattcacttcttacttataatctgttgaaacgtcagccacaaaagtattcttatagcaacaaactacccgtaaaattgcagttggctactcacttcatgaatacaacggatggtaaactttatgtttatgaattgaataacctgccgttgggggatgctacggtagcggcgctcgatctgaataatcaggagtggaaacagaccggagtagcagccttgccggtacagttgcaccatcatgacggcttttgggatgaaacaaccgggaagtatctcgtttttggcggttttggtaataagcgttttaataatacattcctcgaatatgatatcgagggcgaccgttgggataccctttcttattccggcgaccggattatcccccgttatttctcgggtatggcagtcaataagaaccgggagcatatctatgtctttggcgggatgggaaatgaatcgggtgagcagagtgtaggccgaaattatcttcacgatctttatctgcttgacagaaagcagcagtctgtgcgacgtttgtggcagaacgcttcggatcatcgtttggtcgtcgcccgtgatatgatactgacccctgatgagaagtatatctatgctctgtgttatccggaatatctttcggatacctatctgcaactttatcgcttgacggttgatgatggaacgatgaaagctttgggagattccattccgatgcgttcggaagagattatgacgaatgctaacctttactataattcattgacgcatgagtattactgtacgaccacggaatttgacaagaagggacatacggtgattcggacttatgtgctgtccgcccctccggtttctctggatgaaatccgttcttacggttccaggtcttctctggagattcgttggttatggataatggcaggaataggagtattattgcttgccggaggtgtgctgtttgtcaggaaaaagaggggaaaacaaagaaatgcggttctggaatcatcttctgtgctcatgtcaccacctgtcgggagagaaccggataaaagtgtacagggaaaagaaacgcttgcaaaagaagattttgagtcatccctcgttcgtccgaatgcagtttatttatttggtccttttacggtaattgaccggaatgggcgggatattactcatttgttcagttcccgtttacggcaggttttcatctatatcttgcttcatagtactcataatggagtattatccgcctccttaaatgaggtcttctggcccgataaacccgacgacaaggtgaaaaacctgaaaggggtaacgatcaatcagattcgtaaaaatctggctgaactggatggagtggaacttgtacacgacaagggatatttcagactggtgtttactgactgttattgtgattatttccgtttccgcaccttgaagaatgctgaagaggtcgagaatgaactcggcattttattaatgcgtggcaaattccttgatggtatggatgcagggatgatggatcacttcaagcaaaaagtagaagagttcttgtcttccttcctgccattggaaatcgaacgtctgtatcagcagcataagtatgatgccgtcattcgtttctgtaatgtgcttttccgggttgatccggttaatgagctggcactggcttatggtatgcatgcccttaaccatacaggttcgtcacaagaagcgattctgcaatattccctgtttgtgcgtgagtacaggcaaatgatgaatgaagaatattctacttcctatgcagaactgatgagcaaaaatcctccttttcatcgataaaaacatttcggttaatgatatttattcgcttattaatccgttattaacccatcactaataagttgtttaaccttgctacattatgtttgcagcgatgttatttacttattgttttatttaaaaacctaatacgtatgaaaacaagattctttatgaaactttgtttattcagtttgttggtttggtgtgtcagctcgtgcaagagcgataacggcgattcagtgcggcctattgcacttgaatgcatgtacacgcatctgaccgacatgacaaacatgcttgataccgcaaagatcggtacaagtgacggtactttcccattggcaaatgcccagaacctgcaaaaagctgtcgaagaactgcaaacaggtatttctaaaggtatggctggctactttgttctacagtatgaaatagataactactgtatagccgccgaaaaagcgattgccgaatttcaggattcctatcaacagacattgcaaccgggtacgcctgccgaattaaaggtattcggcattgacggtaaagggcgtattgaatttggttccgatcctgcttatggtggcggtaatactttcaccgtagaaagttgggtgaagtatgatgccggtttctttgagtcgggaattggcagtttcctctctacttttgacggtaagcagccgaatgagggatggatgatcaacttcttaggctctaatcttcgtacaacgatcggtatgggaccgcaggaaggccgcgtactggaagaaggccgtgcttatcctgataattttggtaaatggaatcatgtcgtgacggtgtgggataatactttgcctgaaggacagctgaaaatgtatgtcaatggtgaattattcttcagtaagacaaatgatgtgaagaatgatgccggagtattacagaattatatgcctaacacccgtaaccagaatatgtgggcattccaggaaccgactgacaattcacgctgtatgaccggatttattaagaaattccgcatgtggagtactgcgaaatcggcgaatgaggtaaaaacgctgatgaactcggatgtgacgggaacagaaagcggactggtatgtgcgtgggacttcacgacagtggtcgaagacgttaccaacattccggataagacaggaaaacacgttgcgaaaattgtaggtaactacaaatggtttaaagttgagaactaaccttaataaacagacgaagagtatgaaaaataatacgataaaaataaaggctttcctctgcctgctgcttctgacgtgcggatgggtaagtgtgcaggcacagcaggtgcttacagtgaaaggtgtggtagtagacgctttaaaagaaccgttgcccggagccagcgttcaggtggtaggaatgtctaccggtacggtgactgacttggatggtaattttagtcttcaggttccgaaaggaaaaacgattgctgtttcttttataggatacgtgacacaggaactgactgtaaatcagaatcagtcgaaccttaccattcagttgaaagatgattccaagcagttgaatgaagtagtcgttatcggttatggtacggtagaaaagaaagatttgacaggttctatccaatccgttaccagcaaggaattaagtaaactggtggctaccgatgtcactgaaacactgaacggacgtgtcggtggtgtactcgtgaataagacttccaaccgtcccggttcggatacgaaaatagagattcggggtatcaactcgttcaatttctcgaatgaacctttatacgtgatcgacggagtaccttctcaaacgggaatgcgtcatttgaactctgccgatattgaatctatcgacatcttgaaagatgcgtcttccagtgcaatctacggttcgcggggtgcaaacggggtggtgattatcactaccaaaggagctaacaagcgtcagggctttaatatcgactattcgggttacgttggtttcaagactcctacccgtattcctgaaatgattggtaacatgggcaatggactggaatatgtagactatcgcaccgctttgtggaaaaagaagtatggtgatgcttcactgagccgtccggactttctgactgatgacgagaaacgccgtatcaaacatggtgaatactatgactggttgcgtgaactgtcgcagaatgcattgactaccagtcattctgtttccgctaccggaggtacggataaactatctttctcattcggcttgggatacttgaaggatgacggtatggtaggcgatgaaagttttgaacgtattacggctaatgtggggttggaatatcgtttttctgataaattcaaaacagggattaacagctatgtttctctgaataacacgaatgaaggagccaatgatgctttgattaatgcgtacttcctgccgcctacggtcagcccgtacgataaggacggaagctacctgtttaattgtcagccgacttccagcaagattaatccatttgttcagattgaaaataataaaagagagaaagaagcaaactataccaatttctccggttatctggaatatcagccgattaaaggactgagctttaaatcacagattgcagttcaatatgattcggatgtttacggagaatgggtaggtacgatgacacaagccaaaggaggtctcaatgcaccggaagcttaccggaaagaaggacggaatatgaactgggtatgggacaatatcattacttatgataaaacctggaagaatattcatcgtctgaatgctataggtttgtatagtgtacagaaagaaactcataagggttcggaaatgcgtggcgacggtctgccttacaactctgactggcatgcgatcgaaacagccgaggaaattcgtgatgtgaagagttactattgggagtcatccatgctttctttcatgggacgtgtcaactatacgttgatggatcggtacttgtttactgtaacagggcgatatgacggaacttcccgtctggctaccggcaatcagtggggatttatgccgtcggcagctgtcggctggcagatgaagaatgagaatttcctgaaaaacgtagactggctgaatagtctgaaactccgcgtcagctggggtaaatcgggaaacaatagtattgaccatgatattacctggacaaagctggacctgacacattatatctatggaggtaaaggtgaaaatgctttcggactaggcgaccgcaaaggtaacaaagaccttcgttgggagatgacttcggagtggaactacggtattgatttcggcttcctgaataatcgtatcaacggtacgattgatgtgtataaccgtactacgaaagatttgattttcgcccgttcggtaggtaacctcaacggctatggctctatccttgagaatataggaacgtcttccaataaaggggtggaaatagggctgaacacggtgaacatctcaaagaaggactttacatggaagacaaatctgactttctctctgaaccgtaataagattgtagacctctacggtgataaaaaggatgacttggctaaccgctggttcattggtcagccgatgaaggtgatctatgatctggaaaaggtaggaatctggcagacggaagataaggaactggctgctaaatacggacaagtgccgggacatatccgtgtagccgatctggacgagaactatgtgattgatgaacgtgactataaagtactcggctctccatcacccgactggacagcaggtatgaccaatacctttacttacaagaactgggatttgtctttctatatgtatgcacgtatcggtggtgtctacaatgatgacttcacttatatgtttaccgcatgggataatgaacactggaacaaattgaatgtgaagtactggactccggaaaaccacagcaatgagtaccagcagatcggtgcgcaatcctaccatactcaggtattaggtaagatctccggttcgttcctgaaaatacagaatatcacgttgggatatacccttccggaaaactggatgaagaagatgaaaatgaaaaatgcacgtgcttacatcaatgtgcagaatccgtttactttcaccgactatctcggtccggatcccgaaacgattggtgaagacgtatacaagtctttgtcactttatccgatgacatttacttttggagtgaatttaaccttctaaatacttgaaaccttatgaaacgagtaaaagaacaaattaaatatttggcactgttagcaatctgtttgctaagcggatgctccgattttctggatagttataacccttcggcagtaacggacgatttctataatactaaagaagggcaacagaaattgttgacagatatcaatgcccgttaccgcaatgttttcaatacaggcgaattgcagtattacggaactgatatctacatggctatctccgaagaacctgccgaacgtatgttcaacggctatgacaagactttcaactccaccgctccgattgtaggcgattattggaaagtactctataagattgtgcaggaaagtaacatcctgctgaatcgctgcacaccggatattgcaggaagcgattatacttcgctgaccgcacaagcccgctttttccgggcaatggcttactattatctggtagaaacattcggccccgtacctttgctcaccgaagagaatacaagtgttatccagcaggcggaacgtaccggtgaacaggctatttacactttcatcattaccgaactgaatgatataaaggataaactggacatgaccacgatttctgccggaaaggtgacgaatgcggcagtgattcactttttagggaaaatgtatctgacacgtgcttacaaatcctttgctgaaacagacgacttctccaatgcagcaacgacatttgatttgctggtagagaatccggcctccggttatgctttgcaggaaaactatgctgctttgttcgatgaaaacaatcaggctaattcggaagtgatctgggcgattcaatatggactggataagaactatcggggtgatggaaatccgcaacaggcacagttcggatttaatattgtagcattggagccggatctgttcattaagaatcagaatgattactctagtgtttcccgtaaatactgggtgaatccgaaagcgcacgagctttatacggacccggaagcggatacccgttacgatgcgacgttcaaacgtgaatattacataaacaatccggataatgctgattacggtaagctgggaatctatttcccccgttggaacgataaatcgggtatgagtaataacgcgaaaaggttttatccgttcaagcaggacgatgaatatgtgtggtatccgcaatctacggcacttcctgtattagaaactgcttcagatcgtatgccgatggtacggaagtttagcgataccaagatacaatggggcgaaggcggctctcgtgaagatgtcattttccgtctgggtgatacatatctgttgtgtgctgaggcttatctgggtgccggaaacaagaagttggcattggaacgcatcaacagtatacgtaagcgtgccgctaaagatgcgaccgcttatgaagcaatgaagctgacagatctggatataaacgttatcatggatgaacgtgcccgtgaattgatgggagagcatgaccgctggtttgacttgaaacgtactcagacattgctgacacgtgtacctgcatacaatccgtttgtggtgaagtatgataatttgaacaagaaccatctggtacgccccattccgcaagatgaacggaacaaagtagatggattatctcagaatgaaggttattgattaatggttaactaacaaatgaaagaagtaattatgaaaacgactatatgtggcgctgcactgttgctcagcttgacaatggctagttgtgaagtgtacgaatcaccggaaatcaatcaaggattgaacgaagaaaacaacacgtccctttatacagatgcttatgatccgatcagtaatgtggggcaatactatatgccggaaatgaaggtgaaaccgaagaagtactggaattgtgtggaagttgtaacggtaggcagccgtaatgagctgggacaaacagagaaagtacgcggattgcagtaccacctgatgtgtcagtcattggccggtctggctaatcgtgccgtagaacagggaacaagtgaaatagctgtttggctgcacgatcacggtggcagtgattcctataaactgtctaagcaggcactcgaagatatgggtatccacgaacaggggatgcagagcggactggaactggcacgtaatgattatggtccgtctgacggagtaactattcagttgaaaggaatgtttgacggatatgtcttgacggatattgagcataacccggagagcggtgtcgtagcatctgttgcttctcatatttataattctattattgtggatgtccgtgacaaggaatattatgaagaagcaggatataccatgaaatatgatgcaagaagcaaaactactgcacaggcatgggcggagttcaaagacaagtgcagcaacaaagcattggtgattatgcctgtacaaaccggtgaattgcgtgagtttgctattaagaatgaacttttcgtattgaacttgaataagcgtcagggcagttcggctggcggacagaatacggctttgctgaaagaaatccttgcctggctggaaccgaatgcacctgtctacggatgggaacagggagtaagtgaagatgcttttgtcgatttggtttccaaaagcggtcatccgatgatcccttgtgactggagttacaatcactccttgacttcattgctttattctcaacgtcagaaatcgacattggctcacgtgaagaatccgcagtttctggattatacaaagaaaaagaatttcgtttctttcttcctttccgatggtgacaatatccagtggatgatgaatgactttaaagatttttataatgcggcggagtcggaagaagtacggatgacgtatggtattgctgcttcagtgcttccgatgatggcaccggcacaattcgataatctgttgagtcagcaaaagccgaattgctctattttggaaatgctgggaggtggttactattacgtagacaattatagcgagaatggcgaccgggcgaagaatctgaaagtcgtggcagaacgcctttcggctcatatgcgtcaacatcgtgtgaaactgttgggtgtaatggctatgaacgtaaaatcagaagctgccaaagaagcatttcaggcttatgtagatgccaatgaccagttggaaggtattgtagcgcttcagtatagtccttatgcaggaggtgaaggagacattatttgggtaacgaataaagcagggtatgatatcccggtcattacggtaaaatactctttgtggaattttggaaaccggaatgcggaacgtgaaggtacccctgcctatattgccggaagattgaaacaggaagcacagcaggaaagtttttctgtcgtatgtgtgcatgcatggagtaatttctccgatcacggacagacggaagatccgctgattgagaaccagtccggggatattcgtggagccggagcggcaaagctttgtgcaggacatctgaacgatagttttgaagtcgtaaatatgcaggaactggtgtggcgtttgcgtatgagccagcgtccggaacagacgaagaagtatctgagtgaggtattttaattaacctgagtttcacaggctttctgcatggttttctctgttttaacgtggcaggagaagtgatacagaaggcttgtgaaacttaagcaaataataatagatatggttacaagattgtttttcttatcaatctgttttccttttctgctcacttcgtgtcagcagtcaaagaagacggtagagtttgtagactacgtgaatcctttgatgggtaccgagtctacttttgcgttttcgcatggtaatacttatcctgctgtggcggtaccttgggggatgaacttttggagtccgcagacgggggagaatggcagcggatggatgtatacgtatactgatagtctgatgcgcggtttccggcagacacatcagcccagtccctggataaatgactatggtacattttccattatgccgctttccggagaactgaaaatgagccacaaagaacgtctggttcctttctcacatcaacaggagaaagcgactccttataactacagtgttacattcaataacggattgcagacgtctctttctgctacttcccgcggagctgtattcgaagtctctttccccgaaaaggaagatcagtatgtagtggtagatgcatacaacggaggaagttcaataacgattgaaccggaaaaacggctggtaaaaggtgcgacacgttataataacggaggtgtgccggataacttcgctaattactttatgatggaattcagtcatcccgtcatagaatacggtacttacaatggagatactttgttgcaccatcaaaccgatgtagcggccgattatacctgtgcctatctgaaatttgatgttccggcaggtgagaagctgaccatacgtacagcctcttcttttatcagtcccgaacaggccgctatcaactttaatcgtgaagtagctgatgcggatgtacaactgatcagcgggaaagcccgtgaacagtggaataactatctcggacgtgtagaagcggaaggaggaacagacgaacaacttcgtaccttctattcctgcctgtatcgtacattactttttccacgtgagttctatgagtttgattcacaaggaaatcctgtttattacagtccttatgacggtaacgtgcatgatggttatatgtatactgacaatggtttctgggatacgttccgtgcggttcatccgttattcacattgctatatccggaagtttcggaacgtgtgacgcaatctatcattaatgcttataatgaaagtggctttatgcccgaatgggcgagtcccggtcatcgtggttgtatgattggcaataactctgtttccttattagtcgatgcatggatgaaggggatacaaacggtagatgccgaaaaagctctggaagcgatgattcatcagacacaagcccgtcatatggaaatagcttctgtaggacgtgacggcttcgagtattatgataagctcggttatgtaccttatccggaagttcccgaagctacagccaaaacactcgaatatgcttatgctgactggtgtatcgcccgctttgcggaatcgctgggtaaacaggatatcgcagaccagtattatcagaaagctcagaattaccgcaatctctattatccggaacacggttttatgtggacaaaagatgccaaaggcaactggcgtgatcgttttgatgctacggaatggggcggccctttcacagaaggaagttcctggcactggacttggagtgtgtttcatgatccggaaggcttatccgaattgatgggtggacatgaaccgatgatagcccgactcgactctatgtttgtggctccgaacacttataactatggaacctatggtttcgttatccacgaaatagctgagatggttgccttaaacatggggcaatatgcgcatggcaatcaaccggtgcagcatgccatttacttgtatgattatatcggtcagccctggaaaacacagtaccatctccgtaatgttatggacaaactttacaattccggaagtaaaggatactgtggcgacgaggacaacgggcagacatctgcctggtatgtattttctgctatgggtttctatccggtttgtccgggaatgcctgaatatgcgataggttctccattatttaaaaaggtaactctgcatcttcccgaagggaaaaacttcgtcgtttcagcagcagataatgcggcagaccgtccatacataaggaaagctctgttgaatggacaagaattcacacgcaactatctgacgcatgatgaactgaaacagggcggagaactgaatctgtcgatggacagcgtaccgaatcagcaaagaggtacccaaccggcagacttcccatattcttattccaagtagtttcaataggttttagtatacttttcattgaccggtacggagagaatcttaattgatttgatctgtatcggtcatacaataggaatttaaagtcaggctttgtctttgctgtttcttttgttacctttgtgcatctaatatgaggtttatgatacattctcttccatcttccgaacccttgacggcacaaaagcttttctcaaagctttatgtttcctactatgcccgtttagttcgtttcgcttccctttatgtaggagctatgggagacgcagagaatatagtacaagattttttcctctatttatgggaacgtaaagagatacttccggaactgcaacagcccgatgcatatcttttctccgctgtcaagcatcgctgtctgaacttccttcgttcacaactttctatagtagaccgcaggcagccgctttctgatattatggagcaggagtttaaactgaaactttatagtctgcaactacttgatgactctcaaatgtcgatagatgaagtagaaaaacagatctgccgtgcaattgatagcttaccggaacgttgccgggaaatatttgtcatgagtaagctgaagggtatgaaatatcgtgaaatagccgaatcccttggcatttcgcagaatacggtagaaggtcaaatggctatcgctttgaggaaacttcgggaagaattgcgtcattgtatgcctttattgcttttattcggaatctgaaactgcactgtttttcactccgttggaatgataaatccactctttttgataactgtatttttctcccgttaaaattttctttgatttttttcattttcctttggtggtaaatgtaaattgctgtgtcttcttattaaaagcgcgcaatatgatgaacgagaaatggaatcaatactttttcggagaaccgaccgaagaggaaaaacgggagctttttcaggaactggaaaagaacgaagatatgaaacgggaatttgcagaaatgcaaaatatcataggtctgtccggattattacccagagaagatgattctttgaaaggcgaacggaatctggaagcactgatgaaccgccaggagaaaaagctgaggcggaaacgggtgttgcaagtcatacgatatactacttcggcagccgctatgattgctctgacgtggatgctcgcctggtatatgcttgttggttcggagactccctcttatacggagattacagttccgaaggggcaacgggtacatttaactctgccggatggtagtgaagcatggctgagttcactttctacattgaggtggccttctgttttctcgtccgatgcccgtatggtagaactggatggagagggattttttacagtgacaaaggatgcttcccgtccttttacagtacaaacgcagaagtatgatgtaagagtgcttggtacggaatttaatgtatatgcttatagcaatagcgaaaagtttgagacagacttgctttcgggtaaagtgagagtcagctctaccggatatcctgaagagtcggtaaacttattacctgacgagaaagtatctttgatagatggaaaactggttaagtcctcttctcattttggaggaaaggaataccgtgaacaaggaatctatgactttgaagaattatcgttgggcgaagtgctggaaagattggagcaatggtatgatattcattttactgtagatgatccatctctgttgagtaagattatttcgggtaagttccggcaaagcgatcagattgaaacgattctgaaagcgattagccgtgcggacttatttgagtacaaaatactgtcacagcgagagataacgatatattaataatctgattaaaagtttaatgcctatgtaacacaacggagtagaataaaacgaaagtaaatagacatcaaaacgaggaataaaaagggggaaagtggtgcaacactctccccaattcctcggctattaatactttctctgtttcacatttttgtgaacctaaaattaagtactaacaaaatcacttagcaaagttatgaaaaaaatcttttcactgctcgctttggtcctgtttattaacctttttacatatcaggctcaggcacagacagcagttgtgaatattaataaaacttcggtttcgctaaaagaactgattcacgaagtcgaaaaacaggccggatatttgtttgtctacggaaaagacatcaatatcgaacagaaagtaaaaatcaatgcccggaataaacaggtaaaagcattgcttgaaaatgtattgccgcaaatagggctgacgtatgaatacgccgacaattacatctcattgaagaaaacgcaggtagagaaaaaatcaataggtaaaaaaataatagtcaaaggaaccgtagtagacaaaagtggcgagcctattatcggagctaacatcatggagcagggaagtgcttccaatggtacgatcacggatatcgatggtaaattcacgttatccttgccttccaattcggtattagcggttacgtatgtgggtttttccacaaaaaatattccggtgaacaatcagaatgccattcagattgtgatggaagaggattctgaaattctggaagaagtagtggttgtggcttacggtacgcagaagaagatatcttctacggctgctgtatcaagcatgaagacaaaagatgtagcgcaaaagccggttatcaatatttctaatagtttggcaggccgtatggcgggagtcattgcgaagcaaggatcgggagaaccgggagctgatggttctgatttgagaatccgtggtgtggctacgttagggaaccaatctccattggtcgtagtggatggagttccccgtgacttttcacgtatcgatccgaatatgatcgaggatattactatcctgaaagatgcggctgccgtagctccttatggtatggccggtgccaatggggtagtattggtgactacaaaaaagggaaaaagcggtgctccggtactttcatacaatggatatatcggttttcagaacccgacccgtatcactgaccaggttaattcgtatgaatatgctttgatgaaaaacgaagcggctatgaatgcaggttatcccaattattatgcttactcacagcatgatctggaaatgtaccggaagacctgtgccggagatccggatgccgatcctgaccgctatcctaatagcaacggtctgcgtgacttggtacaaaacaattctgtgattacgaatcacaacttacagctatccggtggtagcgataaattccagtactatgtgtttttaggatattcttatcaggaaggaatgtggagcactaccgattaccagcgtttcaatttgttggctaatttaagcgtggatgccaccaaatacacgaaaatcagtttaagcctgggtggatggcacgaaaagaagaattatccgggtgccgatacaggcgacatcatgtatcaggcttatcgtactcctcctatctcagctattcagtactcgaatggtctgtggggacaatatgtaggtaagtcacttttcgggctgacctatcgcagcggataccgtcaggagccagccgaccaactgaatacttctctctctatagagcagcaacttcccttcattcaagggttaagcatcaaaggagtaatcaactacgacccgtatcgtgtgaagaaaaagaaatatctgacaccgatacctgtatacacactggatgcatcacaaactccgtatcaattcatggaaggatttcagggaccggaaaaaccgaatcttgaacaatcatttgaagaaagcgtgagcatgacttatcagggaatgattaattactcacggactttcggcaagcatacggttaccggactcggagttattgaagcacgcgaaagaaacgtatggaacatgagtgccaaacgtttgaactataatattgacatggatgaaatcaatgcgggaagtagtgaccctgccgatatcagcaacggcggtacgtcctggaaagaacgtcaggtaggttacgcattccgtttggggtataattatgataaccgttatatggcggaagtttccggtcgttatgacggacactactattttgctccgggcaaacgttttggtttcttccctgctttctcactgggatggaacttgcgggaagaattcctttatgaaggacatcgaatggatggataaactgaaattacgtctttcttacggtgagtccggaaacttggctggtagttcctatcaatatatgagtgattatggattcggaaacgctgtaaatcttggcggtgtacctatgatgggtatgtgggaaaacttgcagggaaatccgaacatcacttgggaaaaagccaagaagtttgacttcggtgtggaattttccgtattgaacggtatgctttctctggaagctgactatttctatgagaaacgttcgaatatgctgatggctccgaatgcattggttccggcagaatatggtattcctttgtcacaggtcaatgcgggaagtatgcacaatcagggtattgatttatctctgaatttcaacaagcgtatcggcaaagactggatgatcagtgcaaaaggtactttcactttcgcacgtaatattctggatgaagtatttgagacggaagctaccttcaataacccgaatcgtcgcagaacaggacgtcccgacggaacaatgttcggatacaatgctttgggctactttacttatgatgatttcaatcctgacggttccttaaaggcaggcatcgctactcaaccctgggggcaggtatatccgggtgatttgcgctacgaagatttaagtggtcctaacggcgtgcctgatggaaagattgacgagcatgaccagactgtaatcggtttctctaactgggcgcccgaaattattttcggtctggctcctactgtccaatggaagaacttcgacctgaacgcattgattcaaggggctacccgtaccagcatttcattgggtgagactttggtaatgcctttctttgattctggttcggctactaagttacaattcagtgatcactggacgccggataacacgaacgcaccctatccccgtctgactagtgaagtaacggtgaataaccatcgtcaaccttcttcgtggtgggtacgtgatgctacttatatccgtttgaagagcattgaaatcggttataccttgcctcgttcggcactgaactttattggtatcagctctgcccgtgtatatgcttccggacaaaacctctggacatggactccgtttatgaaagagctgatcgacccggaagccaaatccgctaatggtaaatactatatgcagcaggctgtatatgcttttggtttgaatattactttttaattagttaaccatcataacaagatagaatatgagaatacataatataataaaaacagtttgcctggcaggctcattagccttgttgtctgcctgtgaagactggcttgaaatagagccgaaagaccgttttggagatacaacggtctggggatcggaagaaaatgccgatatgtttctgaatgatatctataatcagttgccgcatctgaacaatgaaacacagaatctggatcagtattcggataactcatacgtaggtgcggaatggatgaatgcccgtacaacgatttataccggagcattatctcctaccagctggatacccggcccctgggatatgtggaaatggggacgtcagaacaatgacgacgccaaaggacagtatgaacgtatccgctcctgtaatctgttcattacaaaagtaacagaatccgatttctcggcagattataagaaagaacgtcttgcagaagcgcgtttcttgcgtgcctggttctatcattatctctggatggcgtacggtggtgtgcctatcattacggaagtgctggataataacgtgagtacggatatcttttatccgcgtgagactgcacagaaaacatttgagtttatcgacaaagagttggacgagattaaagatgatcttcctccacgtcgtagcggttctgatctgggacgtgcttccaaaggagcaattctgacgctgaaaggatgggtggaactgttccatgccagtgaattgcgtaatccgggcaaagacaagaaacgctgggaagcagctgcggctaccttgaaagatgtaattgacttgcaggtctatcgtctgcaaccgactattcttgacctttggacagaagctaccaacaataacgatgaagtgatcttcgacttccagatgtctaagcagaatggcgggcgtcgtgaaggcctgttcggtccggtgtttgtaaaaggagtacagtccagttggggaaatatgcagcctacacaggaactggttgacgactattgcatggcaaacggattgcctatcactgaccctgcatccggttacaataagaataatccttataaaaatcgtgagaaacgcttctaccagagcatcctgtatgacggatccatgtggcagggggaagagattatcactcgtgtaggcgtaggtagtcccaatgagattgatacttcttcggatagtgacgttacgaatacgggatactatactcgtaagacgattgacgaatccgtgaatggagcggacaatctgcaaatgagcaacggaatggcaaattatattttcttccgttatgcagatgtgttgctgatgtatgcagaagcttctttggaagccggagataaaccgactgccatcgaatatctggatatggtgagaacacgtggagataatatgccttctatcaacgatacttatccgcagggaatcacagaaaatcagttgcgggaaatcattcggagagatcgtcgcatagaactggcgtttgaagataagcgttggtgggacattcttcgctggaagatttgtgatggtgaaaacggagtgatgaataaaccgattggcggtatgaaaatagaagataccaatggagatggtgtgtgggaatacaattatcatgaagttggtaaacgtaccttcctgccacgtatgtattatcagcccattccgcagtatgtgatagacaagaatccggtgatccgcgagcaaaacggcggtgaagacggatgggtaaacgggcagaatcccggatattaataaagaatgtaaaccttgaaagattattcgtatgaaactaaatagatttgtcatggcggcaagtgcggtactttgttcgtttgccttgctgagtggatgtagtgatgatgatgtttgtaaagtatatattccggaagccaaaactttgcagattaaaaacttcgatttgggtgaagaactgagagaagtatttcatgtggctgtgactgccagtgactatgtgacccgttccggtaaggaagtgggaggagatgtaaaggtacagttgactgtggatgaggcgaaggtgcaggagtataattctttgtgtggaacagactatcctttgcttccttccgattgctatacgctgacaacagaaactgtgattccggccggggagagttcttctgccgatctggtgcttacggtaaatgcacagggaaaaatccagccgtttgattcttatttgttgccggtcactatcacttcggtagaaggtgcgcaggcggatcatattcagcagacggtatattaccttttgagtggtgcggaagatgtatgggcgatgccattggccgatcgcagtgcatggcaggtagtagaagtttcttcggaagagacgagcggcgaaggatcagagaacggtcacgctatccacgcttttgacggactgaaaggaactttctggcatacacaatggaaaggcaacgagcctcagccaccacatcatatcgtagtagatatggggcaggaagtgaaaatgctgggctttcagtatgtatccagagatcatggtgaagcatggccgcaggagatgacgatggaaaccagtctggatggctcgaagtgggagtcggcaggaacttacagcgaccttcctgcgggggcaaaagaggaattccgttcctattttccgggatttaagcaggcacgttatttccgtctgacaataactgccgtgtatagtggcaaatgggcaacagcggtagcagagattaatgcgatttctattattaaataacagaaaaaacgattaccatgaaaaaatacatttatatacttttgacgttctgtctgttaatctcctgtatggaagatccgacggcaggtgtggtcgttcctaaatatactccgtctaccgagaatccgggaggtccgggtgaagaaccgggtgatgggctgatagatccggcagaaccgctggacaggggatttatacatctgaaaggtcgtgaactgaaatccctgaattctatttccatcacaggactgaatgatggcgagaaagtaattctttccactttggcagggcttgcggcaagagtgacgggcgatcaggtttatatcaatgaaggaggtccttcttccgtatggttgaagcagatgcagaataagtacggaattccggtaaatacttataatgctttggctccgttggtacagcattatgtagaaaccggagtgatcaaggggtatattgtctatacgccttattcggaaggacaatctcattcgatcaatgtagctacttctttatgtgggttgcttcgagggattgcggtaccggaatctcttgtcgataaggtaaaggcaatgggagtaacaaccgaacttatggacgtaaggtcttatgatgagaagtggttgtacgagaattataaagaccagttggacaagagtcttgcagccgatatgaaaccggaaatcttccatcacctgcgcgattatatcacaatgaccaatgcttttgctttttatgactacaatgcgcgcagggattggtcatggcgtacttctatactgaaagatctggataaaggagcttattgtttcggttattatgatctggatgaatggggcatggtgaataatgcttctcaactgggtgtttctatgttgccgaccgatcaggcggctaatctggccacgttgagtagtatatatgatacaacaggactgaaacagcgtccggcaactaaagaagtggttaccgaagagaatgtgcactatgtgacattcctcgtcagtgacggtgataatattgcgtttaacctttgggggcaacaaggatacatggatcatgacctgcacggtcaattcccactcggatataccatttcaccttctctgtacgatttggctccggctgctttacgctggtactatgagaatagcaaagaaggcgattactttgtagcgggtccgagtggcagcagctatatattcccgagtaagatgtcggatgccgacctggacgattatctggctaagttgaatgagtatgtcgataagtcaggcttgaatatctgtaatattctggatcagaagattatggataatccgaaagtttacaataagtatctggctcagcctaatatcgatgcgattttctacacaggatatggagaaaaaggagatggaagaatcaaattttcggataatggcaagccggtgattgagcagagaagcgtattatgggaaggtatcgacggtggttcgaacagaggtgaagaatcgactgtcatttctcagatcaatagccgctctgccaatccgcatagtgccgacggatatacttttgtatttgtacattgctggacaaagaaccagcaaagtatcaaaaccgtcattgatggattgaatgacaatgtgcgtgttgttcctgtcgatcaattcgtgcagttggtgaaacaaaatttgggtccaaaataaacgaatatactcgtaatttatttattatgaacataaaagtattagttgcatcggcagttgctgcgttcagttctctgccggtcatagctcaacaagcgccagctccttgcgggttggttccgagtgcccgtcaacttgaatggtataatcgggagatgatcgctttctttcattttggaatcaatacatttgaagaatatgtgaatgaaggagacgggaaggcaagtacggcaatttttaatccaacagccctggattgcaggcagtggatgcagacattaaaagcagcggggattcccgctgctatcctgaccgccaagcatgccgacggattttgcttgtggcctagcaagtacacagattatagtgtaaagaatgcagcgtggaagaacggtaaaggagatgtagtccgcgagtttgtcgatgcttgtgaagagtatggattgaaggcaggaatctatctgggacctcatgaccgtcacgaacacctttcacctttatatacgaccgaacgctacaaggaatattatgcccaccagcttggcgaactgatgagtgattacggcaagatatgggaaacatggtgggacggtgccggagccgacgaattgacaacgcctgtttatcgtcattggtataagattgtccgtgagaaacagccggattgcgttatcttcggtacaaagaattcttatccgtttgctgatgtccgctggatggggaatgaagcgggagaagcgggtgatccttgttgggcgacaactgactcagtagctattcgtgatgaagctcagtattacaaaggtttgaatgagggtatgctggatggtgatgcgtatattccggcggaaacagatgtttcaatacgtcccagctggttctatcatgccgaagaggatagccgtgtgaagagtgtctgtgaactttgggatatctactgtacctccgtggggcgcaatagtgtattgcttctgaatttcccgcccgacagacgtggtttgattcatccgaccgattcgctgcacgccgccttgttaaaacaggggattgatgagactttcagtacgaatctgttgagaggagccaaagtgaaagcgaccaatgtacggggcgcaaaatatagtccggagaaaatgttggacagtgagaaaaccacttattttgccggaaaagacggagaggcaaaagcggatataacttttacccttcccaaggctattgagtttgattgtctgatgatcgaagaagttatcgaactgggacatcggacaacgaagtggagtgtggagtacactgttgatggcaaaaactggatcaccattccggaggtgacggacaagcagaccattggtcataaatggattgtacgtctggcaccggtgaaagcaaagcaggtacgtttgcgtattcaggacggcagggcttgtccggccattcatacttttggcgtatataaacagtcaccggttttcaaatcataatataattagactactaaatgatgcaacgattaaaaatcttgggaagtgcattgattgcactgtcgttttccgcctctgcggttgtggcgcagcagtttgacccgaagcaaggatatgaaatccatacggtcaacggattagtgctggacaatcaggagagtctggatacgaatacgaaaatatttatcagtaagcgggaggcagacaaagaatcgcaggtctggaacctgattccatgcgaacaagagggatgctatacgataaccagtcccttgactcaaatgaatgtagataatagtggtaaaggaaaagtagaatgttccgtgattcaatggtcggcagaccctaaaaatccgaatcagcaatggaaaataacggctttgccgaatgggaattacgtattaaccaatgtcgggactggctataacttaggatttcctgatgccggactggtcggagagcctgtctttcagttagaaccggaagcttcgaaaagtaaccagcagtggcagatacggaaatcgaacctgaaagtagtggcggaagccttgaaaacaacgagtcataatgactgggaaaatgaacgtatctatgcaatcaataaagaagaaggcagggctacatttattcctttcgccaattcggaagagatgaaggcggatcccgcttatacccgtccttgggagcgtacccgctcttcccgttatctgctgttgaatggaaactggaagtttaactgggtgaaacaaccttcggaacgtccggtggatttctataaaacgagttatgatgtctctggctggaaagagattcctgttccctccaactgggagatgcacggatatggtacacctatttataccaatattacttatcccattcgtaacaatcctccttttatacaggggcagcgtggatatactgtagagaaagagccgaatgcggtaggatcttatcgccgtgaatttgctcttcctaccgactggaaagacaaagaagtctttatccatttcgatggaatttatagtgcagcttatgtatggatcaacggtaagaaagtcggttattcgcaagggtccagtaatgatgcagaatttcgtatcactccttacgtcaaagcgggtaataatacggttgccgtggaagtttaccgctggtgtgacggcagtttccttgaagatcaggatatgttccgtttaagtggtattcatcgggatgtttatttggtagccagtccgaaagttcgtctacgtgacattcacctgacttctcagatcagcgaccgtttggataaagcggaactgaaagtgaaaacggacgtgcataattacggaaagaaagtacaggaagctaccgtacgtgtctctttgctgaatacggaaggaaagcctgtgagttcgtttatcatacctaccggtaagataactggtggacaggaaaacgtctgtgaaggtacgactacgattcgtgaccctcggttatggagtgctgagactccttctctgtataccgtccaactggaactgcttgatgccgcaggcaatgtgcttgaagcgacgagccagcaatatggcttccgtaagatagagatccggaataataaggtgtatatcaacaatgcattgatcctttttaaaggagccaatcggcatgacatacatccgcagtttggaaaagctgttccggtggaaagcatgatagaggacattcttctctttaagcgtttcaatctcaacacgattcgtaccagtcattatccgaacgatccgaagatgtatgcgctgtatgattattatggcttgtacgtcatggatgaggccgatattgagtgtcacggcaatatgtcgctgtcaaaccgtgaaagttgggaaggagcttatgttgaccggatggtgcgtatggtggaacgggataagaatcatccttcggtcattttctggtcaatgggcaatgagtccggtggtggtcgtaactttgaggctacctatcaggcagccaaagcgatagacgaccgttatatccattatgaaggaatgaacgatgtggccgatatggattcccgtatgtatccttcgattgaaagtatgatcgaacaggacgagcaaccccgtaacaagccttatttcctttgtgaatatgctcatgcgatgggcaacgccatcggtaatttggaagaatactgggattatattgagcatcattcgaaacgtatgatcggaggatgcatctgggattgggtggatcagggcattaatatgcccggacagcctgcagatcattattattttggaggcagcttcggtgatcgccctaacgacaatgatttctgttgtaacgggattgtgacggctgatcgtcaggttactcctaagttgtgggaagtgaagaaagtctaccaatatatcacattggaaccgaatgctgaaaacagtatcggcgttcgtaaccgctatgctttcctgaatctgcatgattttaatctgcgctatgtgattttgaaagatggtgtgccgatagcggaagaagagttcagcctacccgatggtaagcctggagagcatcgtgcggtgcagataccttattcccgctatttaacttcagaaggtgaatattatttgaaccttgaaataaaactaaagaaggattgcgtatgggcaaaagccggacatatcgtagctacggaacaacttttgcttcaaaaatccccgaataccgggctacagccggtagcagtttccgcctcatctaaagaatctctgtttaaggtggtggaagaggagaagcgttatttgttcttccgccgtcccggtgtagaaatcacctttgataagaaagaaggcaagttgaccggtatccgttataatggcgataatatgcttcatctgcgtgaaggatggtcgctgaatacgttccgttttatcaataacgatgtgcgtaaatggcaggatacccaaacggaggtaatcagtttcgactggaaatggtcggaagataatcagtcggcaattgtaacgattcagttgcaggaaaccgtcggagatgtgaaagtgccttataaattgatttaccgtttgtatggtaatggtgaaatagatgtggatgcttcttttacaacgaatgatgactttaatcttccccgtctgtcgttacaggccttctttaatccttcgttggagcagttggaatggtatggtcgcggtccgatagaaaattatcgggatcggaagaatgcggcttatgtcggcaaataccagtctgctgtcaatgatatgaaagagagttatgcccgttctcagacgatgggtgggcgttgtgatacccgctggctgactttgaccaataaagcaggtaaaggaatcaagattactgctgccgatacatttgatttcagtgctttgcactatacggataaggacttgtttgaaatcaagtacggtcatgccttgcctgatatttatcgtgcggaggtggtgctgaatctggattgcatacagcgtggtctgggtaatgccagttgcggaccggggccccgtcccgcttatgaaattcagaagaatacagtttataaatatgctttccgcatgtctcctttttcaaaataaggaaagattgacaggataacaaggtcttaatagtttgtagaaagagtgagcagccaaatcttataaaagatggcaactgcttactctttttttgtatttaaggatagattctgtgttcttttcgtacttttgtaacatggactctaaattatataccacgatgaaacaaagaattatattattcggattaatacttgtaggaacagtaacttttgcacagtctcccgaagaaaagggcttgaacacgatcaatcgttcttctgccgaagcaacaatcggtttccttgcaagtgatgaattacagggacgtgaagccggattccacggttcatatgtctcctctgagtatatagcatctatcttacaatggatgggaatccaacctctgaacgaaagctacttccagtcttttgatgcttaccgcaaagagcgtcagaagaaaggacgtctggaagttcatccggactctgtagcgaagctgaaacaggaagttcatcaaaaactatcaatgaggaacgtactggctatgattcccggtaagaatacgaaggaatatgtcatcgtaggcgctcactttgaccatttggggatagacccggcacttgacggagatcagatttataacggcgcggatgacaatgcttccggtgtctcggctgtattgcagattgcccgggcatttcttgcaagcggacaacaaccggagcgaaatgtaatctttgccttttgggacggagaagaaaagggattgctcggttctaaatattttgtacagacttgcccttttgtttcgcagatcaagggatatctcaactttgatatgataggtcgcaacaataaaccggaacaaccgaaacatgtcgtctatttctatacagctgctcatccctcttttggagactggctgaaaaaggatattaagaagtatggtttacagttggaaccggactatcgtgcctgggacaatccggtagggggcagtgacaatggaacgtttgccaaagcaggtattcctattatctggtatcatacggacggacatcccgattatcaccagccatccgatcatgctgaccggttaaactgggataagatagtggaaatcaccaaggcttcttttcttaatatgtggaagatggccaatgaagcttcatggtaactcagcctcactgaaaggctgttttacatcttgcaataaagggcggaaggaatcagtttgaataaccatgccacatatttccatctttgggagataaaggcgacttttttcctgtctgatatagcctttttgatttgttttacggctttatcgacaggagtaacccaaaacaatccttctcctttcgccatcgctgtatctacaaatcccggacggatgtcagtggtgtagacagcaaagggtagctttgccgccttttgccgcagtccctccatgtaattgatttgataggcttttgaagcattataagctggtgctacaccgctgccgcgtgttccgcctactgaggaaatgttaatcagatgcccgcctttctgctgttcaaagtaccggaacccccagccggcgatattggtaaatcccactacgttggtcaataaggtcggttcttcgagctgataggagagctgcggattcagttcccccgttccggcacagataatcagcatatccatgcctcccatttcttgtacaagcgtttccagtgataaaagggtcgtttctgtgtgagtgatgtcacatacctgatagaatagtttatctttatcttgtgcgcaaatctcttttaatagattctcacggcgaccggtgatgccgataaggcagtcttcacgggcatactgttctgccaatccacgaccgatgccggaggttgcgcctacaattattattttcttcatgaatttaaatagactatgtttgcctgcaaaggtaggagaggagcctgaataaaatcttgattgaaatcaagaatttacttctgaactacttttctccggatgcggctcaacgtttccggacgaataagtagataggaggcgagttcttttaaagtaatcagtttcagcaggtcgggacagcggttgataatatccagataacgttcttccggtgtcagactgtacatggagatcatccggtcatatatttcccacagaagagtttctgcaatccggcgtcccagtttttggtggtcgttgttaatgtcgtagaaatctgccagttgggaatggttgatcacatacaccgtacagtcgcataacgcttgaatatctacatttgattggtcctgcaactggaaagccggataattcccgacaaaagaatggtcgaatgtatatccgacaatgctgctttcgcccagactgttgacacaacaatagcggaaagagccggaaacaacaaaccccatgattttacaggcttctccttgccgtacaaagtactctccttttttataagaagtctctttcccctgctgtaatgtaaaatctacaataggggaatagttgatatgggaagtatatttattgaaatcctccacagtacgacaatgattaaccttcgtttatcacttggaatccggcaagtttcaaatcttcccaataaccgggatatgatttggaaacaacttgcgggtcagcaatcagcagcttagggaaggtgattactgccggtgcgaatgccatcgccatccggtggtcttcgtaggtcgcaatcacaggaaccgcttccggttcgcaacgttcgccgttccacatcaatacgctgtcattttcttcttcgatgaggtatcccagctttttaagttcggttctcaatgcggcgatgcggtctgtttcctttattttcagactttgcaagcctgtgaagcggaaagggatatttaataaagcgcaagttacaacgaacgtctgtgccaggtccggaatgtcaacgaagtcttcttccagtcgttccggtgccttgcctgtttttttgatctttacgccttggggagtgaactccgtcgtgatccccagacgggagaaaacttccgctcctcgactgtctccctgataactgttgcggaataatcccaacagttcaatctctgcttccggagacaaagcggcaatctgataccagtaagaagcagcgctccagtcgctttctacggtgaaggggacactctgatacggttgcggagctacggagatgctgctgggcgaagtccatgtcgcctttgctccgaagtcctgcattaattgcagtgtcagattgatataaggacgggaaatgatctctcctgtcaagtgcagtgtcagtccgtctttgagcaccggacctatcatcagcagggcggatatatactgtgaactgacgtttcccttcagcgtgatttcatttcctttcagctctgcgcccttgatgcggagaggcggatatccttcgttatgggtgtactctatttcagctcccaactcgcgaagggcgttgaccagaatctgtatcgggcgttgctgcatacgggcggtgcctgtgataatccgctctcccgaagtggcactcagataagcggtcagaaagcgcatggcggttccggctgccatgatgtctatagtctctttaccttcggtcagtgcttttatcatcacctgggtatcgtcgcaatcggacaggttttccggcggataaatgcctttacccagcgcattgatgatgagtgcgcggttgctgatacttttggaagccggcaactggattgttgcctttaccattgaaggggaaataagtttatagagcatcattctaagtatattctttgttatggagtacaaaagtagagatttattcggagacttccaactgcttctgactcttatcgagagagttgaaataatatctgtaccgatgtttctgctgatacctcatgagccatggaatagcaagaaggatgctcgtaaagagtatcagaatgaatgtaagtccttttaatccttcgtaatcattgaaatattgaatcacgaatctgacggctgttccgtaaaagaatatcagatatatagtgaaatcaatattgattcttcgttccagctgtcttttaagcattgccccggattctttcagtgaatatgtgtctgccgaccttgtgagaagctgataatgtccgatggtcgaaaccagcagaaacagcagaaaggcacttccggtccatagggagatcgaggcgcttcccatgatgaccgtatcccagatgctggccgttacggagaatgccagcaggatggcaaataaagagatcagcgttttctgacgacgtaaggtttgggaaatggtacgacaatgcttcttgcgtatcacttcttttatattcattggctttatttctgtgccggtatgtattttttcccagcattctttcaaattattgtcttccattgtttaattgtttaatgagttgtttcttgattctattaattttcactccgacattactctcggaaatgccgataacggcggcgatttctttgtattcataaccttcaagataaagaatgataatcgctttttctatttcggacaaccggttgatggcttgatatagctgctcttttttatccgttgcggtgttttcttccggatggctgtcacgtatggcatattcctgtgtcgataactctttgtaaacgggctgcacagattctttccgcacaagatcaatggcagcgttcagcgtgactctgtagagccatgtcgaaacggtgctctcctgcttgaatttggggtatgctttccacagccggattaatatctcctgataataatcctcacggaacggatgctggtagaaatagatattgcatattttctgcaatatcccttgatactggttgattagttcgataaattcttcttccacttcattttaattttaatgtgttttggagagttagtcgtatgacgggggattattcttacaaaagaagaaataaaaaatgatatttaattcctgtccggcggataaaaaaagttctttctgtttatcaattaatcatttataatgatttgtttgcgaaaagattttatatttgtggcaaataaaataactgatttatgaatataccgaatatccgtttgctgaatcagcagttatcaaatccgcttttccgtgaacctaaagagttggtgtcctggatgggagccatgcaggcacagaactattccatggtgaagtgggcagtagggatgcgtctgaaatcggctacgattcaggcagtagagaaggcattgcgtgagggagaaattctgaggactcatgtgatgcgtcctacgtggcatttggtggcggcagaggatatccgctggatgctgaaactttccgcgcaacgtattatttcagcaaatgattcttttgcgaaaggatatgatctggacatcccaaacgaactctatacgaaagcgcatgacctgttggagaagattctttgtggaaagaaaagcctgacaaaacaagagattgccgaacactttaaccgttcggggattgtggcggacaatcaccgtatgactcgctttatggcacgtgcggagcaggaaggcatcatttgtagtggcgaggacagaggaagcaaatgcacgtacgcacttttggaagaacgggttccgccgatgcccgaactgacgaaagacgagtctttggcgcgcttggcacggagttatttccgtagccattctccggcagttttgcaggatttcatttggtggtcggggctgccggtttcggatgcaaaacaggctgtttatctgattgcttcggaactgacaaccgaacaatggaaagaacagacatggtatattcatgacacctgccggactcgtggcaaactgtcgggacatatacatcttttgccctcctatgatgaatatctgctgggatataaagaccggacggatgttctgccccttgaacattatcccaaagcgtttactaacaacggactgttctttccgattgtccttcataacggtcaggtcataggaaactgggataaatcggaaaagaagaaaagtgtcgacctgaaatattcatggttcagacaggtggccgatatggatgaagaaacgttggaacgggagcggcagaagtttgcccgttttttgggaaaatagcttgatgggacactggtaaagtgggagtgtttagtggaaagttccgttaggatatggaaccgggttctgttactatccattagccgacgatagttactcattaatcacataaatagcgattttttttcgttgcacctaggtgagacgaaagagtcacctaggtgcttcagttgtttaaccaaggtgagacaattgttgtacctaggtgcaacggaagaaaatagccaagaatgacgatcattttggctgatggaatacttgtttagccatatatctccctaaagggtaattgttctgagtgaatcgctattgattggctcaacaagactgtccgcgaagtgtgattgtgtaccatcattttgctccgccatctaagggagcttgttggaagaactgtctttctttatttgccggcttgttttttagcccattccagtctccgctgatctgccaaaggagttaccttaaattcttcgaatgtggccgtgaatccctttccgtccgggcaggctcccattaatccgaccataaccggacaattatcctgcaaccagcaagtacgcatcatcgtatattccttatcatcgcgggagaagaaaatctccactgcatccagtcggcggaccgctttaatccataaagaacgaggagcatccggcagttgcactacactccagtcgctggtgcagtgggtgactacggcacttacattctgtttgccgtctacgtactctacccctgcctttatccagttctcgtggtcgatgcgtaacatcaatcccatttggtcgaaagtagtcacataattgccggttattttcactttcacctcaaactctccgccataagtagcatagtagaaaggtccgtcgtctaccgtaaatccgtagtgggaaatccgccagaaatcggttttcgccggaacgtccatcactaaagccttgccttcttttatttcccattgctgaggctcattcagccagttcattttgtccagactttgtgccatagaagaagttgctgccgccaataacgcgattgacatgattttgatttttaaatgtttcatgttcgtttcttatttatttatctttgtggtgcaaagataggtcatgcctgtccttgcgacaatactgaataataaccattttatacgatggacgtactacaaaaagaaattgatgaagtctatgctacgcatccgacagcgcacgaagcactggataatggaatagtggaacaacaccagcagtttgtccgctcattgacggaagttaatggagggtgtgctgtcatttccgatctttcgaaccggaaaagttacgttactgtccatccgtgggcgaatttcctgggacttactcccgaagaggcggctttaagcgtaattgattcgatggacgaagattgtatctaccggcgcattcatccggaagatttggtagaaaagcgtttgatggaatacaagtttttccagaagactttttccatgtctcccggcgaacggctgaaatatcggggcagatgcagactgcgtatgatgaatgaaaaaggcgtttatcaatacattgacaaccttgtgcaaatcatgcagaacacccctgccggcaatgtctggctgatcttctgcctttattccttatctgccgaccaacggccggaacaaggcatttatgctacgataacccagatggaacgtggggaagtagaaacattatccctttcggaagagcaccgcaatatcctttcagaacgcgaaaaggaaatactgcgctgcatacggaaagggctgtcgagtaaagaaattgccgcgactctttatatcagtgtgaatacagtcaaccgccaccgacagaatattttggaaaaactttctgtcggcaactcgatagaagcctgtcgggcagcggagctgatgaaattgctgtaatattccttgaatttatccgggatttatccagatagagtatttatccaagcaaagatagcagatcatcgagtcttttcacctgtttcaagcgttcgtgtgcgaacgtttccgttacttcatgcttccacatgacttcaaaaggaatatgtactccgtatccacctaaagataagaccggctgaatatccgatttaaaagaattgccgaccatcaaaagttcggaaggagttatttgcagaatactcaatagccggagatattctttttccgtcttgtcggacatcacctcgatatggtcaaagtaaggagataatcccgaacgttccagcttattctcctggtccagcaaatctccctttgtagctactaccaacttgtattttcccgtttctttcagcgttttcagcgtttccttgactcccggcagtaattcgataggcattttcaacaaggatttccctaaatcaacaatttgccgaataatgtcggctgcaatctttccgttgctgatctgtaatgctgtttcgaccattgaaatggtaaacgccttggcgccatatcccaaaatttgcagattattcatttctgtttggaataaggcggctgagatttctttggaggtgccatacggtttcagcaaatccgtatactgtttttccacttcctgaaaaaaaggttcgttactccacagcgtgtcgtctgcatcaaaagctatgactttaataagttctttcatcggtcttgtcgttaatgggggacgagaatcgttccgttatattttgcggcaaagttactgtattttcatataaatccctatctttgttacccgttttaagtttgaattttaataggagatacaataatgaaaataggagataaggtgcgtttcctcagtgaggtaggcggtggaatcgtaacaggattcaaaggaaaagactttgtactggtggaagatgcggatggttttgatatcccgatgccgatacgtgaatgtgtcgtgattgaggcggatgattacaatataaaacgcaagcctgccgcgacagctccgaagcaggaggaccccgcgaagccggtcaaaccggaaatgccggttatacagcgccagccggaagtgcgtggcggtgatacgttgaatgtgtttttggcttatgtgcccgaagatgccaaagcgatgatgactactcctttcgaggcatatttggtgaatgacagcaattactatctgtattatacttatctgagtgcggaaggaaaggcttggaacaaccgttcacatggactggtagagccgaataccaaactgttactggaagaattcaccaaggatgtattgaatgaaatggagcgggtagctgtccagctgatcgctttcaaggatggaaagcctgccgccatcaaacctgctgtcagcgtagagctgaggattgatacggtgaaattctataaactgcatacattcagtgcttccgatttcttcgaagaacctgctctgatttatgatattgtgaaagatgacgtgcctgccaagcaggtatatgtgtcggcggaagagattcagtcagctttgttgcagaaaaagtttgtggataaacccaagtcgcaacctattgtgaagcccaaccacggtcagagcggaaaaaatgggattattgaagtagaccttcatattgattccctgcttgatgatacgcacggaatgagtaacagcgaaattctgaactaccaactggacaaattccgtgaagtgatagaggcgaataaagagaagcgtgagcagaaaattgtgtttattcacggaaaaggagacggagtgcttcggaaagccattattgatgaattgaaacggaaacacagcaattaccgttatcaggatgcctcttttcaggaatatggtttcggggctaccatggtgactatcaaatgattctggtgtacttgtaaatgatgctgaaaatgtatttgccggaataaagtccggcaggtgggatgagataaaaagaagggtggagaacttgaccggtctccaccctttctcttgctatatgattcaattttacttacttaggtcgatgcctttattcagtaaagtaaggttcatcagagcggcatatttagcatattgttcagcgctgagcgtctttctcataagtttcaagttgccgtatacagcgttgcgcaattttgcttctttatctttcttggctgtagtggctcttgacatctgttctgagaaataatcgcagatgtttgctacttcttcgctctgaacagagtttaactgcaaatatttacctaatttatttacgttgatgttaccttcccattttgcagttgtaggttggtttcctgctgcaaaagtcgaagcagcgaggcagagtgctgccactaatgttaatcctaaacgtttcataatacctactttttaattgttatacctaaaaactattcctaaaaaacaaatctaatacctattgaaaactgatctaatcgcttagttttttctttttacctatgcaaatatagcgatatgttttatagcataaaaataaagaaaaggaaaagattttgtttcggttgatttcttgatgtaaatcaagaaatcaactgctttttgatacaaaaagaccttattctgaaacatttttgcaatacgtgtgcggaaacgaaaatgtaatataactgaattttaaggaatattgctgttaaaatgatattgagcaaaggaaggtgacgagaaatggaacactgaaatcaactacaaaaccatgaaagatagaaatgattacgaattcttttccggaacatcgggtgatgatgggaagagtagtgtccattgtggtagctcctcctacagaaataggggccagcttgccgaaatacttcacgagtaacggggctcccagcaatgctatgatttcacgcatgatgttggataacaatgcgattgttcccaattccggacctttatattcggtgatgaatatactcgaaagggaatagtagccgaatccggctcccactgccatacagtctgaagaggttctttggctcatgaaaatgcctgctacggcgcatcctgccaatgtgcccagtatcgtcatgacggggaggaacatcagacgtggattcagagaacggaaacttttcagagtattggggtcattgccgatactgatacctacgcagaacatcagtccgcaaagggcgtaatagcttagtttgctatccgtaaaatcgtagggaatcagatgataaaacccgcaaagggtaccgagaatgaaaaatgagacgatgatcagacttcctttcatacttccgtctcctttcctttattccttatatataataggtaccagagtccccatgcgcaaagtatactgccggtcactgccgccagtgtgataatgagtgcttcgagtcccaatgtatgcagtcctttgatgatagcctcgtttcctcctacatcaatcccgaggaggaagagcaggacccatatcagcagagtgattattttatgtatccaagatagtcttttattacgtagcaggaagcccaaaagcattcctgtcagcataattccgatgatgataaacatagtaagtgcctgtttttggctgcaaagataattgaaatagatcgttgttcctaattaaagtcggtggagacgttcgtaaaatgaaaggaaatttttagcgaatctggaataaaaacagaaattgaagcctggtttttagtaagatgtctaatttaaattcatatatttatagccgtcaaattaatgtaagatatatgcggagactaaaactatattatttgtttttctacagtacgttgaaaataaacgttccgctgtctatattaggtgcacttattgtatcaaaagctgactggagcttgttttgggaagcttttccttatctattgggtggctggggaattgttgccagtttgctttataaggagtttcttgaaaaggaagcctactttttctattataattccggaattttgaaacggaatttgattgtctttgtgtttgctgtatattggtctgtactttggattgtaaaattatgcatcacttgcttgaaatagatagtattattaagaatttcggtaccaggcaactgctgactgatgtttacctgaaaataaatacaggtgatgttattggattgttcggcaggaacggtacgggaaaatccgtgttgatgcaaataatcttcggaacaatgaaagcagaccggaaatttatccggttggatgaatgtaaggtcctttcggctccttaccaacatgcaaggacaatagccttcctgccgcaacaaggctacttgcccaagcatgaaaagataaagaaattggtagactgttacctggatgctaatgtcgttcccgacttttatgaggatgatgaagttgcccagtcgtgtatggaacggcgtgtctcccaactttccggaggtgaacggagatatttggaagctaagttgcttttgctgggcaatgctaaatttgtcttgttggatgagcctttcgattatttatcctttcatttggtagataaactgatcggattaataaaaaaacattcggaagagaaagggatagtgattgctgatcataattacgaaaaagtcttagaggttgtcaatcgacttgtcttgattcgggagggagtattgatggaactaactgataagcggggattggtggagcaggggtatcttttagatgaaagttacttatgaatcctgctcctatatttatttttgcaagtcatttcgggttattttccctgattcgaaccgtttgagatacttccgtgctgatacctatcattcccgtacctccatgtacattactgggatatctgagaggttcgttaattgtttcgtcataaacgtcggaatcgactagattgagtgctttcagatagtaatattctgtttccgtgatactcaacaaacggatgatgacatccattccttcataatatccgttgtaattgttgttgtatgggatggcgggatcgttgtagaccgtcattgtataggaggtatctctaaatcgcgaatcatcaaagacaccataaatgtttttagctgtgtcgaacagtccgttgtcttcgtcatctcctgtggaaggttgaccgtctgtcagtactatgtcttcgcgtccgataaatgaataagtgatatgctttgtccagtgaaggtaatcttctcctccttcttcgtggttgtatccccatagtcgcatttgtttatctactacaatgcggtagaagtttgcctcgttcgggcggtctttaaaagttattttgtagcgcatgtagtcttgagtatgtccgttttgtattagcgggacggtgagcgtgtcgatgttttctattttatcaaggcgttgcggaacggtgacttctgcccaggcatgatatttgccgtcatcggtcatggcatcaatacgcactacttctcccgaagcaaatttgcctgtgatgttgaaccggcattgcttgtcatactcagtttccatcgggagtgggcgcaaggtctctcttaactctccgttgacgtgaacctctacagtggcattttcaatgtggttggcatagtcttttcccgtcaggttaaggaataagacatttgtcagactgtcagcgttaatgaatgcattcattaccaatttaggaggattatcctttatattaaaagggagttcattttcacaagatactgtcaccagtattataactagcaggataagcggatgatatatataagttttcatgttaacttagaatttgtaagtgtaagtaaaagatggaatgcaggggagcagggtatattttttgatcacactttttccatcgtcattatgagagcgaaatacccatgccggattcatggagttgtatgcattataaagactgatgttccagatacgcattccgtgcttggtctttttattgaaattaatccctatgttcaaccggtggctcgcaggcagccggtaattattgcgatgttctatgtaattggcctctccaacattaggggaattgttataaataggattgtagtagttatcgaatcccagaataaagccattgtttgctccattaccaggacggatgatggttgttttttcttcgggaatagtactggttcctcctgtgtaaaacacccacgaggcaccgatgtcaatacgttcgctgaatttatggttgagagtcagattaataatatggcgccgatcatatttgtatggaaatcgctctccattgttgatagcacctttagcaaatttgcggtcgcttttggataaggtataagacaaccagcctgttgtcttcccgagcgttttttgagccataaattcaattcccatcgaacgtcctttccccatttcaactttgctttcccatccggtggaagaaccgaaaaaactgactccgtctttatattccagcacattgtacatgtctttgtaatagccttctactgagaactcccaacctttgatacctgtataatatccccccaatgaatactggtgggatcgcatcggtttgattttttttgtgacaggcacccataaatcagtaggcatagcgatgggcatggacgaaagcagatgtacatattgactcatctttgtataagatgccttgagaattacgtctttacttagttgataacgtgttgagacacgcggctgcaaggagaaataactttgtttttgtacttgaaacagagaaaagtgtaatccaagattaagccgtagacgagtaccgatttttaggttatcttctgcataagccgatacttcatgtgcataaatccggctgttgttcatgctgtggtaagtagtgtcgcgaaatgcctcagagtctaccttgtctgatattttggaggtcatcacttccggacgaaaacggtgatagatatatcctgctccaaatttaatatggtgcataggagatgggttgtaatcaaaatctatctgataattccagtcattgatacctgaacgatagtctgaagagtatcggttgatgaaggttgtgttattggtgagtgaatattgattattcgaatatgcacttacattgaataggtagttgttgtaggaaactgtcgtgttgctaaacaggcgattattgaaaatgtagttccatctggcggaaatgattgtgtttccccagttcattttacttccgtccttgaaatcgctattatcatcatattgggtagcgaagtgatctttcccgttataagcactcagatataaacggctccggtcggaaaacttgtgattgatctttgcattgatatcataaaagtaatagttgtatttctcatcatcgggcatgaatggtttggctattaaatcaatatacgaacgtctggcggatatgttgaatgatgttttgtctttcacaatcggtccttccaaatttattttgctggttagcaagccgatactgagtgtcccatgatattttttcatatccccgtcattggtgcgtacgtcaatgacggaagaaaggcgtccgccgaagcgtgcaggaaaggaacttttaaataaagtgacctttttgatagcttcaggagtaaagacggaaaagaagccgaacatatggtctacgttatataccggagttccgtcaagtaagatcagattttggtcgggactgccaccacgtatatataatccagccgatccgtctactcctgcctgtactccgggcattaactgaatggctttcattacatctgattctcctaatatacttggagtattcttgatttgcaccattggaatctcgacagctcccatctgtgtggcaactgtccctgcttctgctttatctgaaacgaccactacttcttctaattgtgcgtttcctttcatacgaatattcagcagagtatcttgagcaagggtgaaatgatgtgtttctgtggtatatcccaaataagagaaacgtaattccgtttctccttcgggcagagtgatactataaaagccgtaaggattggtagtagtgccttgatattgatgactctcaatgatattagtaccaatcaacgtctcggacgacgtcccgtcggtaacatatccgctgatagtaaacttgcggcttaccggcttttgcacccttttcttttgcaggagaatgtatctctcagagaacttgtaactgatcggttcatccttgaatacgagatccagtatctcatgcaaaggcatatctttcactttcagattgattttatggctgatgctgatttcttcactgtagataaaagaatatcctgtagagttttcgattaacttgacgaactccttcaatgtagcatttcgcaatgtgattgtgagtcgggcatttgcattctgtgcgtatgcctgtgcggtgataaggatcaccatacctatcagaacgagcgttctgataggtaggtgtccttggtgaatagttctcatttagtctagtttttagtaatagtaatctgttgagtgtttcgtgaatagttgaaataaccggcattatgcagtacagataaaatcgcatccaagtcttctccattacggaatcgcgctgtgatccgataatttcgcaaggttgagtcggcaatgtgaatggttgttccgaacgagttggaaagttcgcgggcaatctcctgcaacggcagatcatcgaatatgaactccccgtggcgccatgaaatttcatctccggcattctccagtaccttgcgagtaagcttttgttccaccttattatatatagccgcctcattcggtttcagcaccatgcgtactgagttgtttttattgctgactgcaaccgaccctgttaataaagtcgtctttacatccggattatcgggataggcgtccacattgaagtgagtgcccaatacttgaacgtcaatcgtttctgtctgcactataaacggatgctttgggtctttacttacttcaaaataggcttctccgctcaactccacttcccggttatccgatttgaaccgttccggataggaaagggaagaataatggtttagcgtgacggaagtgccgtcgggcagatggacggtacgtgtttctgccaaagtgctaacagtctgtatggttgccggctgcatgtacagataagctgtccataccgatagacagagtaaaactactgctgccgctgccgcaaatgtgcgtgtcagatacaaccggcggttgcggaaattcagctttttctccagttgcggataactggatgctgctgaaaaacgtcctctcggtgagcgggtggaagcgatgagcttgttcagtatgtcttctaattctctatcggtatatttcatatctttttctatttagctttctttctaattccgtttcagcagaatcgtcagcttgcttacactgccttctttccactggggagtacaggataaggtaatgttctgctgtttcagtaccatctttttgggatataacttaatggtggtcgttgccgatttctgtcccgccttgatggtgactttggtttctgttagtttcataatcggtgcctgtcccgccggcaaagcaggagtggcaagtaacactgtcctgtcttctttggatttgtcggtggcaataattttaatctgcaactcactctcggattgattcttgtcacattctactgttcgggtagatttttcaaatcctacataatccttaggataattgtcattgtcgttgttgcaggaaaataggctcaggcatgctgttaaaaggacaaagagtccaacgtttgcgtcattaaactttttcatcattcaatcttttttagtgattaatcggtttatttgctgataaagaccggagattgacagaaactccctacgccttttgtgcaaataaaagttaatataaaaaagaagtgctgaacggttcgggtgatctccggttatccgctggacgaaatcatctctttcagtcgggagacagctttctgtagctgggcatcaactgtctttatgctgatatccaattcttctgctacttgggcataactttgtttttcttcacggatacggatgaatatttcccggcaacgttccggaagccggtcgagtgctttcacatagattgcaaacagttcttcactgattaatgactcttccggagaataactttgttcctgtggctccggcagggaatcggaatgaatggtggtgtacttcgactctttttccagataattgagagaagcgttcttgaccagaataaagcaatagtcctcgatgtttttcacatcaagaagagtgtcgcgctgcttccagagtttgaggaagatgtcgagtacgatttcctgcgaccattcttcctgtttcacataatagtaggctatgcggaagagtcggtcgtaagtcatgttatagaagtcgcggaaggctgtttgcgagtccagttccttcatttgccgtaataacttccttacttctgattcggtcatcggctgatcgtttagttttttaattaacccaaagcaagtcgctcataatgctgtcggagatgaaaattccttcccgtgtcaggcgtaaagccccctcgtggatttccagtttcccattttccagatagggggcagacattttccggcaatattcccacagttcattaccgaactcttgttttagtttttctataggtgttccccatacggtgcgtatggtggtaatgataaattcgttgtaacgggtcgtttggtccaggttttctgtctcaaagtcgcgctggtttccttctataccttttatatataggtcgatggaagatacgttccattcgcgtgtcgttccattgaatgaatgtgcggacggtccgcagcccaaatatggtattcccctccagtacgaagtattgtgacgggagtatttgtcggggcggcagaaattggatatttcataatgctcgtatcctgcattctgcaaatgttcgatcagcaatgtaaagaactgcagactggaatcttcgtctacttcctctatctgatgttgcttcaacatattatatataggtgtatcttcttcgtaagtcaaatggtaagcagaaatatgctctacatccaggcggatagcttgccggaggtcgtttacccaccgttcctttgtttcgccgggcagtccgtaaatcagatcaatgctgatattctgaaatcccgcttccctgcatctgcggacagcttcgacggctgtttgggagctatggcggcgtttcagtaattggagtgtcgtatcatcaaaagtctgtatccccatgctgatacggttgaaagggagcgaggataacatcttcagatattcctgggacagatcgtccggattggcttccagagtgatctcccggcagtgttccattccgtaattttcccgtatcgtttcaaagatgtgtttaaaatcagcttcctccagttgagagggagttcctcctccgaaataaatggtttctacaggttcgcctttcagatattctttccgcatttccagttcacggcagagggtatgcacataatgcgtctttaattcgctgcgggtagtcgaataaaagtcgcaatagatgcaacgtgtcttacagaagggaatatgaaggtaaatacctgccatagtagatgtttagcttgttaccaattgattatagcctgcaaatttaaaccttttttctgagcaattgatacaattaacgggaattaggtataagtctggcctgtctgctacccataaaacggaccttatgttacataacattgtttagtaacactgtcataaatattgcttttcccccaataaatccctaatttgcgcatcactaaattaatggtatgcgagaaacatactgagtaattactaaaatcttatatattatgaaagtatatcagactaatgaaattaagaacattgccttgttgggaagttctggctctgggaaaaccactctcgtggaagcgatgcttttcgagagtggtgttataaaacgtcgcggatctgttgccgcaaaaaacacagttagcgattatttccctgttgaacaagagtatggttactccgttttctctaccgttctccacgtagaatggaacaataaaaagcttaatattatagactgtccgggttcggacgacttcgttggcagtacggtaactgcacttaatgtgaccgacacagcaattattcttctcaatggccaatacggcgtcgaagtcggtacacaaaatcacttccgatacactgaaaaattgaataagccagttatttttctagtcaaccagcttgataatgaaaaatgcgactatgataatatcctcgaacaactgaaagaagcgtatggatctaaggtggttcccatccagtatcctattgctaccggtccgggctttaatgccttgattgacgtattgttgatgaaaaaatattcgtggaaacccgaaggcggtgctcctgtgattgaagatattccggcagaagaaatggataaggctatggaaatgcataaagcattggtagaagctgctgccgaaaatgacgaaggactgatggagaaattttttgaacaagattctctgacagaagatgaaatgcgtgaaggtatccgtaagggattgatcgccagaggtatgttcccagtattctgtgtttgcggtggtaaggacatgggcgttcgccgtctgatggaattccttggcaacgtagttcctttcgtgtctgaaatgccgaaagtggaaaacacagatggtaaggaagtagctccggacgtaaacggtcccgaatctttgtatttcttcaaaacgagtgtcgagccgcatatcggtgaagtatcttactttaaagtaatgagcggcaaggttcgtgaaggtgatgacttgctgaatgccgaccgtggttcgaaagaacgtatcgctcagatttatgtcgtagctggtggtaaccgtgtgaaagtggaagaacttcaggcgggtgatatcggtgctgccgtaaaactgaaagatgtgaagacaggcaatacactcaacggtaaagactgcgattataaattcaactttatcaaatatccgaattctaaatattcccgtgctattaaaccggtgaacgaagcggacgtggaaaagatgatgaccatcctgaaccgtatgcgtgaagaagatccgacatgggtgatcgagcaatcgaaagaattgaagcaaacgctggtacacggacagggagaattccatctgcgtacgttgaagtggcgtctggaaaataatgaaaaacttcaggttaaatttgaggaaccgaagattccgtatcgtgaaacgattacgaaggctgcccgtgccgattatcgtcataagaaacaatccggtggtgctggtcagttcggtgaagttcacctgatcgttgaaccttataaagaaggtatgcctgtgcccgatacttacaaattcaatggacaggaatttaagattaccgtgagaggtactgaagaaattccattggaatggggcggtaaactggtatttattaacagtatcgtaggtggttctatcgatgcccgtttcttgcctgctattatgaaaggtatcatgtcacgcctggaacaaggcccgttgacaggttcgtatgcccgtgacgtacgtgtaatcgtatatgatggtaagatgcacccggtagactcaaatgaaatctcctttatgcttgccggacgtaacgcattcagtgaagccttcaagaatgccggtccgaagattttggaaccgatttatgatgtggaagtatttgttccgtccgacagaatgggtgatgtgatgggagatcttcaaggacgccgtgccatgattatgggtatgagcagcgaaaaaggtttcgagaaacttgttgctaaagtacctttgaaggaaatgtcttcatattcgacagcacttagctcacttaccggcggacgtgcttcatttatcatgaagtttgctagttatgaacttgttccgacagatgttcaggataagttgattaaggattttgaagctaaacaaacagaggaataaacaataattctctcaaaactgttaaaaccgttgtcttttttaagtaaaagacagcggtttttgtttaactatgattaataaagatggaaaatcgcaaggaaaagatttaattttttattaaatttgcaaaccaaaggaggagttatattgttgtagtaatcagaatacaacctaaatagctctttacggttaatttccgggaacttccggttaaatcaagttaatgtgttaggagtgttaattagggagtgttaattttgttgctatgaagaagtcaacaatttggatattaagtattgtaatggggctttctttccttagtctgttgtatttgcaggtcagttatatagaggaaatgatgaaaacccggaaggagcaatttgattcggctgtgcgcaacagtctggatcaggtttccaaggatgtagaatatgcagaaactatgcgctggttggttgaggatatttcggatgctgaaagaaaagcgctgactgaaaacaatacttcattagggcagaataatgtagttcgggggacacagcgatttcaagtgaagtcacgggatggcaagattatttctgactttgaattgagggtgatgaagatcaaaccgtctgaacttcctaaagcgatggtacgtggacgaaacacgattcctcagacttctaattcgatgttggaagctatcaagaatcgctatatgtatcagcgggcactgttggatgaagtagtgttggacatgattagacgtgcgagtgacaagtcgattggtgatagagtacggttcagggaccttgacgattatctgaaatcgaacttatataataatggtatagacttgccttatcattttgcagtgattgacaaggatggacgtgaagtataccgttgtgcagattatgaagcaaaaggaagtgaagaatcctatcagcaggcattgtttaaaaacgacccccctgcaaagatgagtattctgaaagtgcatttcccgggaaagaaggactatatttttgattcgatcagtttcatgattccgtcactgatatttacgttggtgttgttggtgacattcatctttacgatttatatcgtattccgtcagaagaagttgacggaaatgaagaatgactttgtcaataacatgacgcatgagttcaagacgccgatatcaactatctcgctggcagcacagatgttgaaggaccccgcggtagcaaaatcaccgcaaatgttccagcatatatcgggagtcataaatgatgagaccaagcgcttgcgctttcaagtggaaaaggtgctgcagatgtcaatgttcgaccggcagaaggcaacactgaagatgaaggagattgatgcgaatgaactgatttcgggagtgatcaatacctttgcactgaaagtggaacgatataatggtaagataacatcgaaccttgaggcagccgatcctgttatatttgcagatgaaatgcatcttaccaatgtgatcttcaatctgatggataatgcggtgaaatataagaaagcggaagaggatctggaactgaaagtgaaaacgtggaatgaatcgggtaaactgatgatttcgatacaggataacggtatcggtatcaaaaaggaaaacctgaaaaagatatttgaaaagttctatcgtgtgcatacgggtaatctgcacgatgtgaagggctttggactgggactggcttatgtgaagaaaattattaccgatcataagggaaccattagagcagaaagcgacctgaacgtaggaactaaatttattattgcattacctttattaaaaaataattgatatggacgagaaactgcgtattttattatgcgaggatgacgaaaatcttggcatgcttttaagagaatatttacaggcaaaaggttattctgctgagttatatcctgatggagaagccggttataaggctttcttgaagaataaatatgacttgtgcgtgtttgacgttatgatgcctaaaaaggatggctttacgttggcacaggatgtccgtgctgcgaatgctgagatacctatcatcttcctgactgcaaaaacgctgaaagaagatatcctggaaggatttaagattggtgcagatgattatatcacgaaaccattcagtatggaagagttgactttcagaattgaagctatcttgagacgtgttcgtggaaagaagaacaaagaaagcaatatctacaagatcggtaagtttactttcgatactcagaaacaaattctggctacagaaggcaagcagacgaagctgactaccaaagaatctgaacttctcggactgctttgtgcgcacgctaatgaaattctgcaacgtgactttgctctgaagactatctggattgatgataactacttcaatgcccgtagtatggatgtgtatattacgaagttgcgtaagcacctgaaagaagatgattctatcgagattatcaatattcacggaaaaggctataagctgatcacaccggaagttgaatcttaatgagcactccgataaccacaaataaaaaatcccggaaacattcgttcccgggattttttagttcgcccagcacgaacatattctaacgggtgtaagtccctaaagcgccctgacaacgggaagtatatagccaacggcaagggtgtccatcgtgaggtggaatctgaaggaagcctgcggcaaatatctggtctgacgtacagaaacttgatattaaggcttaaggatgtggataagtttgctaaacaaaacgaagtcctatagttgtccggaacatccaaagtaaatcaagcagacataagatggaaagaatatgtccataactggggaggtctcacgggcgaggaaaaataaataaatacagtcaagcagtaataacgaaccgtgagaagtcagcagaggtcatagtaaccgacaaggtaaaaaaatcggcagtcggtgaaggactgaacttttaatcaaacaagtaccatttaatactttatgaaagagtcaatgcggaaaatcagtaaaacgaactgcccacaaatggataggacagcatccgacgagtatgtgggagtgcagacttttatggagataaaagatgagcagcttgtggaagtgcaattggaagaaaacaatctgttggaactccttctaagtccatcgaacttgaatgcggcataccgccaagtcgtaaggaatggaggagtgggaggtgtcgataagatggagacgagcgaactgttgccataccttaccctccataaagacgaattgttggaaaagatacgcagggggaagtatcgtccgtcccctgtgcgcaggttagaaattccgaaagacaacggtaaaactcgcccattaggtatcccgacagtggtagaccgctttgttcagcaggcaatcagccaagtgttgataccgctttacgaacctcagttcagtgacaacagcttcggcttccgccctcatcgtagtgctcacgatgcactgcataaggtgcaggaatatgcagaccaaggttatcgctactgtatcggtttggatttggaaaagttctttgaccgtgttaaccacagcaaactgatagaggtcttatcccgaaccgtcaaggacggcagtgtaatatctttgatacacaaataccttaatgcaggagttgtagtatctcacaaatacgcggagactgccgagggcgtcccccaaggtggtccattgagtcctatattgagcaatattcttcttaatgagttggaccaggaattggaacgcagggggcacccgtttgtccgctatgccgatgattgtctgatccttgtccatagtcttcgggcaacggagcgagtccgtgatagtatttccgagtttatagaaaagaagttattcttgaaagtaaacaaagagaagacagaagtcggttccatctgcggcaagaagtatcttggacactccttctactgaagagccgaccgtaaatgtggtcttaatcttcataagaaaagtcaatccaagttcaaacgcaccatcaagcacctgaccagccgtagtagtggtcaaggctacgcttggctgaaactccacctgacgcaatacatccgaggttggctgacatactatcgttatgccgatatgaaagattttataatcaaaacagcgaagtggtacaatcgtcgtcttagaatgtatatatggaagagttggaagcgggtacgtacacgttttgccagcttgcagaagtgtggcatccctcgtcggaaatcttgggaatgggcgaatacccgtaaaggctattggcgcattgcggatagttggatattgcatagagcaatcacaacagataagcttgtaatggcgggttatccgtcaatgataattctttatacccaattgcatcgcagttaagagaaccgccgtatgccgaacggcacgtacggtggtgtgagaggtcggaaaacgaaagtaggaggaaaacttctacttcgttttcctcctactcgatttgatttctaataaattaatcagcgatcttcttattaatgacaatataagaaatgagtcccagtactacgaggaatactgaactgcccaaaaccgcgttgttgtttacattgccggtaaaggaacaagccaacaggatgaccactccgatcaagattaatatcaatcccaaattctttaataagcctttcatgcgtgtgtattttaatagattataatattccagtcacaaattaaagcataattctttaacgggcgaaataatttaggtgaaaaatccattataaagacagatttagtggattttatgaattaaacgattgtttttctgtttagtctttggtattgtagaataccttttttaagacctcttgcccgatgctcagttcttcgagagtgatgccatgcagagcttccttcagtgtctgccccgcaatgatgcgtgccttctcttccagttcttttccgtcttttgtcaggtggatcagattggtgcgacgatcttttttgtcggaaatacgtactacaagatgctgccgttccatgttgtctatgagacgggtcatgctgggtttgtctttaaaagttgcattgcacaactcttgttgtgtaacgccgtctttttcccatagaaaaataagaaccgtccattgctccgggctgatttccagaccgttctgacggaaattgcgatatagcttccggttgattgctgcggaaaccttaccatttaggatggcgaatataagccggatatcgaaattaaattgctctatcatgaaattattgtttaaacaactttgcaaaggtaagccacttcccggataattcctacattaggatacaaaaaaagattaaatatttgtagttcaaaataaaatgcctaactttgcacccgcattttaaaataaaataaattatttatttaattaaacgagtatgaatcaatacgaaaccgttttcattttaactcccgttttgtctgatgttcagatgaaggaagcggtagaaaaattcaaaggtattcttcaagctgaaggtgctgagattatcaatgaagaaaactggggactgaagaaattggcttatccaattcagaagaagtcaacaggtttttatcaattggttgagttcaatgcagatcctactgtcattgacaagttggaacttaacttccgtcgtgatgaacgcgttatccgcttcttgactttcaaaatggacaagtatgctgcggaatatgctgctaaaagaagaagtgttaaatcaaacaaaaaggaggattaatcatggcacaacagactcaatcagaaatcagatatttaactccgccctcagtagacgttaagaagaaaaaatactgtcgtttcaaaaagagcggtatccgttatatcgactacaaagatcctgaattcttgaagaaattcttgaacgaacaaggaaagattcttccacgtcgtatcactggtacttctttgaagttccaacgtcgtatcgcacaggctgtgaagagagctcgtcacttggcattgttgccttatgtaactgacatgatgaaataagaaggaggaaaagtatggaaattatattgaaagaagacatcgtaaacttgggttataagaacgatatcgtaaacgtgaaatccggatacggtcgtaattatctgatcccgactggaaaagctatcatcgcttctccttctgcaaagaaaatgttggctgaagacttgaaacaacgtgctcacaaacttgagaaaatcaagaaggatgctgaagcattggctgctaagttggaaggcgtttctttgactattgcaacaaaagttagttcaacaggtactatcttcggttctgttagcaatatccagattgctgaagcattggcaaaactgggtcacgaaattgacagaaagatcatcgttgtaaaagacgctgtgaaagaagttggtaactacaaagctatcgttaaacttcacaaggaagtttctgtagaaattcctttcgaagtagttgctgaataagagcaaatttacttcatatattaaaaaagcgatttgttctgatggataaatcgcttttttttatcatctttgctaataatatgaaattcaaccgttgttatctgaagagaatcgttttgctgttcctggttgctctgggaattggcaatgctctttatgcaaataacgaattgaaaatactggctgactctctgcataaaatgatagatgcgaagccgctcttcgtccagaagaaagagcagcgaatcgctcggattaaatgtttactgaaggactctgggttgactcccgatcgggaatataaggtgaatctccaattatacaatgagtataagaaatttaatctagactctgccatccattatgtcgaccggaaccttgaaatcgctcgtcagttaaatagaaactatttgaaataccagtcttctttgcaactcagccttgtatattccatgtgcggcagatatagagatgcagaattacttctcgaaaaaatgaagccatcagaatttcctcgttcattattagctacttattatgatacatatgcccgtttttgggagtattattcgatttctgctaccaataatcagtacggaaaaaaacgggaagcctatcaggattcactgtatgctcttatggatcatacttcctttgactataaattgtcacgggcttattcttatgcaggacacgattcaacaaaggcgatcaagattttggatgagttgctgaatgctgaggaggtaggcactcctaactatgcgatgattactcattcgtatgccatgctgagccgctatttgaaaagagaggatgatgcgaagaaatatcttatgatgtccgccattgctgatattcagaatgccacacgcgaaacagcctccctgcaggcacttgcactgatacaatatgaggaaaataatttagcggatgctttcaaatttactcagtcggctattgatgatgtcgtttcctccggcattcatttccgggcaatggaaatctataaattctattctattattaatacggcttatcagacggaagaagctaggtctaaatcgaatctgattacttttcttatctcaaccagcgtttctctttttcttttaatcgtgttggtcgtatttatttatattcagatgaaaaaaacgttgcggatgaaacgggcgctggcacaaagtaacgaggaacttttgagactgaacgacaaactgaacagcatgaatagtgagttgaatgataagaatgatgaactgtgcgagattaataatataaaggagcattatatcgctcagtttttcgacgtgtgcttcagctatattcataaaatggagaagtatcagaatatgctgtataaaatagccattaataagtgctatgaggaactgattaaaaagctgaaatcttccgcattgattgatgatgaacttgatgctctgtatactcgcttcgatagagtctttctgaatttatatccgacttttgtttcagatttcaatgctttactgaaagatgacgagaagatcattcttaaacaggacgctttgttgaatagggaacttcgtatctatgcgctgttacgtttgggcattacggatagcggaaagattgccaatttccttcgttgctctacaagtactgtttataattatcgtactaaaatgcgtaacaaggctgcagtagatcgggatgaatttgaaaatgaaattatgaaaatctgaccaatataaacgaatttgtgccattcgataaataaaatactttccaaacaatctacattttttatatccttgtgtatatctaaagtgttgatttataatatgtaatatgattttataatctacataaagttgtgtagactaaataaagcgttatttatttggctagttttgcgatatcagttttcgaacaatctgcctacagatgaaaattgataccttttatgttgtttgtacttaaattcgcaattttttatggatgcacaattttcacttgacacaaaaataaaagtaggaataatcggtttcggtagaatgggaagattctattgggaggcgatgcggaaaagcgggcgatgggagattgcctatatttgcgatacagatcctaccacgcgcgaacttgctaaaaaaatatctcctgaatctcttgtagtagagaatgatcaaaaaatctttgaagacgagagtgtacaggttgtcgggctcttcacattggcagactcaaggctcgaacaaatagaaaaggctattcggtacggaaaacatatcatcgcggaaaaacctgttgcagatacgatggaaaaggagtggaaggtggtggatatgatagaaaactccaatgtactttctacggtaaacttatatctgcgaaattcctggtatcataatctgatgaaggaatatatccagaagggagaaataggtgagttagccattatccgtatttgccacatgactccgggactggcaccgggtgaaggacatgaatatgaaggccccgctttccatgattgtggaatgcattatgttgacatcgttcgctggtatgccgaaagtgaatatagaacatggaatgcacaaggcgtgaacatgtggaattataaagatccctggtgggtacaatgtcacggaacttttcaaaatggcgtagtctttgatataacccagggttttgtctatggacaattatcgaaagatcagacgcacaattcttatgtagatattataggtacggaaggtatcgtgcgtatgacgcatgatttcaaaacagctgttgtcgatttacacggagtacatcagacacttcgtgtggaaaaaccttttggtggtaagaatattgatgtgctgtgcgatttgttcgccgattccatattgaccggtaagcgaaaccctcgtttgcctttaatgtatgactcgactattgcatccgagtatgcgtggaaattcctgcaggatgctcgtatgaatgacttgccggctatcggtaatttgcagactcttgaacaaatacgcgaacgcagaaaaaacatgaaaaatggatatgggttgctgcatagtaatccaccacaaataactaactccttaaaataataaaaccatgtcagacttttcaagaagaaaatttcttaaaacgggagccgctgctttagcaggaatcaccattgctcccagctctattttaggtatgagccacgggcacgtttccccaaccgacaaactgaaccttgcagccgtaggtatcggcggtatgggtcatgccaacatcaacaacgtgaagggcaccgaaaacatcgtagccctttgtgacgtagactggaaatatgccaaaggcgtattcgatgaattcccgaatgcgaagaaatactgggattatcgcaagatgtacgatgaaatgggcaaatccattgacggcgtaatcattgctaccgccgaccatactcatgccatcatcacggcagacgccatgacaatgggcaagcacgtatactgccagaaaccgttgactcactccgtttacgaatcccgtttgctgaccaagctggccgcctctaccggagtagttactcaaatgggtaatcagggagcatcgggcgaaggtaccgacctggtttgcgaatggatatggaatggagaaatcggcgaagtaaccaaagtggaatgcgccaccgaccgtcctatctggccgcaaggactgaatgcacccgaaaaggcggaccgcatccccaacacattgaactgggatcttttcaccggacctgccaaactgaacccgtacaacaacgtttatcatccctggaactggcgtggatggtgggattacggtacaggtgcactgggtgatatggcctgtcatattctgcaccagccgttcagagctctgaagctgggttatcctaccaaggtggaaggttcttctactttattactgagtgcctgcgctcctcaggcccaacacgtgaagatgattttccccgcccgcgacaatatgccgaaagttgccttgccggaagttgaggtacactggtatgacggcggtatgatgccggaacgtccgaaaggtttcccggaaggaaaacaactgatgggccccggtggtggtctgactatcttccacggaacaaaagatacattgatttgcggctgctacggagaacaacctttcttgttgtcaggccgtgtgcccaatgcaccgaaagtatgccgccgtgttacttgttctcatgaaatggactgggtacgcgcttgtaaggaagacaaatccaaccgcgtgatgccgaaagcggatttctccgaatcgggaccgatgaatgaaatggtggtaatgggtgtattggctatccgtctgcaaggattgaacaagacactggaatgggacggcgctaatatgtgcttcactaatattggtgataacgaaacactcagaacctgcattaaggacggatttacgattcatgatggtcacccgtcattcaataagacctggacagatccgatcaacgcgaaacaatttgcagccgaactggtgaaacataattatcgtgaaggatggaagttgcctgatatgccacgataacacgataaaagtaagttaagaattaaagattaaaaattaaatagttattattatgaagaaagtattttatccattagcttgttgtcttgcagcgggagttttagtttcctgcagcggtcagaagaaagccgggagtgctcaggaagagcaatcggcaaacgaagtagcagtatcatattcaaaatcattaaaagcagcggagatggatagcttgcaattaccggtagatgcggatggttacatcactatctttgacggcaaaacatttaatggatggcgtggttatggcaaggacagagttccttccaagtggactatcgaggacggttgcatcaagttcaacggttccggtggcggtgaagcacaggatggtgatggcggagacctgatctttgctcacaaattcaaaaacttcgaactggaaatggaatggaaagtttccaaaggcggtaactccggtatcttctatttagctcaggaagtgacttctaaagataaggacggcaacgacgtgctcgaacctatttatatttccgcacctgaatatcaggtattggacaacgacaatcatccggatgctaaattggggaaagacaataaccggcagtcggcttctttatatgacatgattccggcagttcctcagaatgcgaaacctttcggcgaatggaacaaggctaagatcatggtttataaaggtactgttgttcacggacagaatgacgagaatgtactcgaataccacttgtggaccaaacaatggactgaccttttgcaagccagcaaattcagccaggacaaatggccgttggctttcgaactgctgaataattgcggtggcgaaaaccacgaaggatttatcggaatgcaggatcacggtgatgacgtttggttccgcaatatccgcgtgaaagttctggactgatcacataaataattcaaagataggctgtgtcaaaagtaacatcaacatggcatttagttctgaatgacagaatgatatgcccgacgaacttctgacacagcttttttattttaatacatgaacccctttatctacaaacatgaaactccaaataaatctatgtgcgctggctcttcttttaatgattccgtttacggccatggcacagtctaaaacaaaagcgaaagctaaaaaagaagtagcgattcaactctattctgtcagggatatattgaataaggtggacaataaggacggcaaatgtgacgccgcttatattactcttctgaagaacttggcgaaaatgggatataccagtgtggaagccgccaattataataatggaaagttttacgacagaactcccgatcaatttaaaaaagatgttgaatctgccgggctgaaggttttatcctcacattgcacaagaggattgtcgaaagaagaattagcttccggtgatttttcaagttcacttcaatggtgggaccagtgtattgctgatcataaagctgccggtatgagttacattgtagctccttggatggatgtgcctaaaacacttaaggagttggatacatattgtgcttattacaatgaaataggcaaacgttgtaaacagcaggggatgtcgttcggataccataatcatgctcatgaatttcagaaggtagaagataaagtgatgtatgactacatgattgagcataccaatcctgaatatgttttcttccagatggatgtttattgggtagttcgcgggcaaaacagtccggtagattattttaataaataccccggtcgttttaaaatgttccatatcaaggatcacagagaaatcgggcagagcggaatggttggtttcgacgctattttcaagaatgcaaagacggctggtgtgaagcatcttgttgcagagatagaaagctacagcatgcccgtagagaaaagtgtcgaggtaagtctggattatttgctggatgctccttttgttaaaagctcatacgctaaataaggcataaaaaaaagtctgtgcatgcttttagcatgtcagactttcaattctctctaggctgttctgaattattcagctacagcttcagttgcagtgctatctgcattcaaagagtcagctgcctgagctgctgcttgttctgcttcagctgctgctgcttctacagctgcgattgagtcagcgatgcggatagaatcttgttgagcttttgctgcgtcagctgctttgttaccacaagatgcgaatgatactgctacgatagctacggccatcaaaactaattttttcattttctttgctttttaaaaacgtaatacaatcaattgctttattaaaacgctgcaaagttatgtactttttcaatatgttgttctcgaaaagccaactatttttataattttttttagaagcttgttatattacgccttcaatccatgttttaaaacatactaatcgacagctatactgttatatagataccttttgatgcttcttttcggggttttctcaaattccgtaggataaagctgaatcttgctgactttttcatacgcagctacattattatttaagttcttcagattttcatccatgatggttttcaggttatccggattgttcaatccgagagaatccagcgcttcgtaatccgcatagaccagtgccaccagtttcttgttgcgttcgatgacgaggctttcaagaatgaatggcaggttattgagtttggcttccagctcttcggggaagatgttctgtccgctcgaactcagaatcatgcttttgagtcgtccgcggatgaagatatttccgctggcgtccatagtaccaaggtcgccggtgcgcagccagccgtcttcggtaaacacttcctgcgtggcttccggattcttataatatcccaccatcacgttttcaccacgtacctgaatctctccggtttccgcttccggattttctttatagatgcgtgcctccatgatatccagcactttgccggaagagcctaaaataaattcattccagggagcatagctgatcagtggtccgcactcggtcataccataaccgatggtgaaagggaactttattttgtagaagaactcttccacttcctgattcatggcagcgcctccgatgatgatttctttgaaacgtccgcctaaggcgtctatcagctttttccgtatctgattataaatctgggtgtcgagcaaaggaatgtttaatgcccatttcatacctttcttattaatgagcggctgaatgacatttttatatattttctcgatgaccagcggaacagtgatgatcaggttcggttttacttcctcaaaagccttcatgataattttgggagaaggcgttttaccgagcagggtgacatgagttccgacagcagttgcagtcagaaagtcgaaagcgcaaccgtaggcgtgtgccagtggcaggaaagaaagcactttatctccttttttaagtaactcggtgcggatgccgaaagtgacattgccggcaagattgttgcccgtcagcattacccctttgctgaagccggtagttcccgatgtgtagttcagcagcattaccttatcattggataacgtagtgtattgaatgtcctcgcgcgtgaatcctttcggataggcggcgtacatttcatcattgaggtgtaccagaaacttctgaatagtttctccgtcccgctgatagaggcagcggaagtcggtgagcgaaaaaactccgcgcagtccggtcagcttttcttcttccaggctttcccagatgctgtcactggtaaagaggaaaacggactcggaatggttgacgatatgatgcacatcgttgggcgtaaagtcttgcaggatagggacgatgatggctccgtaggtgatggttgccatgtaggcgatgcaccagtgggcattatttttgccgataacggctattttatctcctctgcgcaggctgcaatgtttgaaaagcaggtgcatacgggcgatttctccggctacctggccataagtataatgaacggattcaccataatcggtatagcaaggtaaatcccaattttcccgaaaactattttcgtatagtttaatgaaattctctttaatcattgcacgttttttagtgaattgtgcaaaaataggaataaactttcgtatcctaaagtgttttactaataataatgtgtaactttgcaggaaatatgcgttataacagattatgatagataccactgtatttcaaaataagacagccgtttattatacgttaggctgcaaattgaacttttcagagacttcaactatcggtaaaatcctgcgggaggcaggagtccggactgcacgcaaaggggaaaaagcagatatctgtgtggtaaatacttgttcggtgacggagatggcagacaagaaatgccgtcaggctattcatcggttggtcaagcagcatcccggagcttttgtggtagtgaccggatgctacgcacagttgaagcccggtgacgtggcaaagataaaaggagtagatgtagtgctgggtgccgagcagaaaggagacttgttgcagtatctcggcgacctccataagcatgaagagggagaggcatttactaccaccaccaaagatatccgttcgttttcgccttcgtgttcacggggcgaccgtactcgtttcttcctgaaagtacaagacggatgcgattatttctgttcttattgtaccattccttttgcccgtggacgcagccgtaacggtactgttgcctctatggtggagcaggcaaggcaggccgctgccgaaggcggaaaagagatcgtactgacaggcgtgaatatcggcgattttggtaagactaccggtgagactttctttgatctggtgaaagcgctggatcaggtggaaggcatcgaacgttaccgcatttcttctatcgagcccaatctgctgactgatgaaatcatcgagttcgtttcccgttcccgtagatttatgcctcattttcatatcccgttgcaatccggttgcgatgaagtgctgaaattgatgcgccgtcgttatgatacggctctttttgcctctaaagtaaagaaaatcaaggaagtgatgccggatgcctttatcggagtcgatgtgattgtaggtactcgcggagagacggaagagtattttgaacaggcttatcagtttatttccggactggatgtgacacagttgcatgtgttcagctactccgaacgtccggggacgcaggccttgaagatagattatgtggtttcgccggaagagaaacatcagcgcagccagcgcttgctgacactttctgatgaaaagacacgggctttctatacccgtcatatcgggcagaccatgcaggtattgatggaaaaatcaaaagcaggtacaccgatgcacgggtttaccgctaactatatccgcgtagaagtggagaatgacgaatcattggacaatcagatgattaacgtccgactgggagaatttaatgaagacatgacagcgcttaaaggcacaattctgatgaattatgaagtctagatttatctattggctggtatatagcgggatgtggctgttttcggcgcttcccttccggatattgtacttactttcggatttcaattacctgttgatgtaccgtatagggaggtatcgccggaaagtagtacgggagaatctgaagaaatcatttcccgaaaaagacaagaaagaaaggctgcagatcgaacgccgtttctatcgttacctttccgactatatgcttgaagacttgaaaatgcttcatatgtcacccgaagacctttataagcggatgacttataagaatacggaacaatatctggaactgaccgagaaatatggcggaatcatcgtaatgattcctcattatgccaattatgaatggctgatcgggatgggatctattatgaaaccgggtgatgtaccgatgcaagtctataaacctctgaaagataaatacttgaacgaattgttccagcgcatccgttcccgcttcggaggatataacgttccgaaacattctacggcacgcgaaattatcaagttgaagcgtgaaggcaaaaagatggttgtcggtctgattactgaccagtggcccagcggaaacgaaaaatactggactacttttttggggcaggaaaccgcctttctgaatggtgcggagcgcattgcgaaaatgatgaacttccctgtgttctattgtgatctgacaaaacccggcagagggtattgtgtagctgagtttaagctgatgacagagaaaccgaaggagacgggtgaaggagaaattacggaaatgtttgctgattatctggaacagacgattcgcagggaaccggcttattggctgtggtctcataaacgttggaaagcttctaaggctgaatgtgaaagggggtaaggatgaaagtgtcagtggttattttgaattggaacgggtgcgatatgcttcgtacttttcttccgtccgtgatccgctattcgaagagcgaagaagtagaagtctgtgtggccgacaatggctctacggatgcttctgtggaaatgcttcgggaggaatttccttgtgtccggatcattgtgctggatcagaatcatggattcgcagatggatataacctggctttgcagcaggtagaagcggagtatgtggtacttctgaattctgatgttgaggtgaccgaacattggcttgaaccgatgatctcctatcttgatggccatccggaggtagctgcctgtcagccgaaaatccgtagccagcggcaaaaagagtattttgaatatgccggagcagccggaggatttatagataagtacggctatccgttctgtcgtgggcgtataatgggagtggttgaaaaggatgagggacagtatgatacgatcctgccagttttctgggcaacgggagccgccctgtttatccgtcatgcggattatcgtgaggcgggcggactggacggacgtttctttgcccacatggaagagattgatttatgctggcgactacgttcccgtggtcgggaaatcgtttgcattcctcaaagtacggtctatcacgtcggtggtgcaactctgaaaaaggagaatccccgcaagacttttttgaattttcgtaataatcttgtcatgctctataagaatctttcggacgaagagttaaataaagtgatgcgtatccggacttgtctcgattacgtggctgcattcacatttctgctgaaggggcagttagacaacgcccgtgcggtgatgcgtgcccggaaagaatataaacagatttgtccttcattttcttcttcccgtaaagaaaacttaagaaaaacttctttgaatccaatccctgaacggataaaaagtagtatcttgtggcagttttatgtgggagggtgcaaaagattctctcaattgtcggatttaaaaggataacaaaatggaaccaaaagtaaggagaggcatcgggctggtagcacatgatgccatgaaaaaagacctcatcgaatgggtgctgtggaactcggaactgttgatgggaaataaattctattgtacaggtactacaggtactctgattctggaagcactgaaggagaagcatcctgaagtggagtgggacttcacaattctgaaatccggtcctttgggaggtgaccagcagatgggatcgcgtattgtggacggtcagattgattatctattctttttcactgaccctatgactttgcagccacatgatacggatgttaaagcattaacccgactggccggtgttgagaacatcgttttctgttgtaaccgttctacggcggatcatatcatttccagccctctgtttatggatcccgattacgaacgtacccatccggactattccagttatacgaaacggttcgaaaacaaatccgtggtaacggaagctgtagaatcggtaaataaaagaaaaagaaagaagagataggtcgttatagactgaaaatatgatagtgtgaggctgcttcaagtagaaatgaggcagccttacttgtgccatgcctttggcacgacgatgccacgcctttggcacaactgtgccatgcccttgtcacaactgtttccaagcctttgtcacaactgtgccacacccttgtcacaaccgtgacactcctttggcataactgtgcccattacttggcacaagcggaatgatagggtgttgtaaataagttgaccggatgtggcagtccggatgataggatgacagaccaatgtgcttcttgataataacacaaactgataaagcaaaggtacttatctgctgcaatgcagttctactccggctgagtcgatgtctgctcccataggcggattccgtttggaaagacgaagttctatttcttcaatggcaggaaattctgccagtagtcttttagctattcgtccgcatacgtgttccagcaacttcgacgggatggacatttcagctttcacggcttcgtgtatttcggcatagttgaccgtatccaccacgtcgtctgtttgaatagcctgactgatatctaccttcaacttcaagttgataatatactcatttccaatgatattctcttggggggctactccatgataagcaaagcagcagatgtctttcagcaaaatatagctgttgtttatcttcatatcttttgttttctaaaaaagtaaaggtaaggctttatttctttttataaagtgttttcgatcatttttgttcgcttattaaatgaatgaaaggctttataaatgagattgtactcatcagctatgtaattcaactgccatttttagtcccatggaagacgtcgtgcgatatctataatatgggggacttctttattcaaaggttcgccgttcagtacagtttcatatttctttaaataggcttctgccatgacacttgaattgaatagatctctggcatattcgtggcagactttcggagaatattgtgctgactgtatatgttcggccatttcctgtccgtgggcggtcagaaaaccgacttccggtgaaacgagttcgggaagcgcaccgtagggagtaccgaatacgggagctccgaagtataaggattcagtgattgcaagtccgaaaggttcgtgccatgtaacggggaaaataagcccttttgactgctcaataataacttttttctttgaatcatctaccattccatgaaaatgaatccgtggattccatgtgaatcggaagcccattttgagattgaggcgataaccgcctaaaacgtccagttgtgcgttcttgatgctttggacaacggcgatagctcctttgatatttttgaccttccaggctgctttgcctagaaaatggtagttttttctggaaagggtgaggttggcgggaccgtagtcatcccagtccagtccattgtaaacgaatgattcgcttccaagtctttgtgcatgattacgtgagacaaaaacgatgttccggtctgcgttggccgggattccattgccgtgtatggtcagtaagtgcggcttggtgattccttcgggaacgggaatgttgaaatgtacgatgtccgcatctgtggggatttgggtgttcagatttacgctagggtccagttctatcactttagcgaaagggcaggaggaaccttttcctgcgatgaaggtgactttgtgtccgcgcttattgagttctttacccagataccacattactctttgagttccgccgtattttatagatggaattttatctcctaagacaatcgttatattcatttgttctcggtctatagttctttggaacaaaagtagtaaattatttgataattaaacttagagttaagaaaagtttggcttgcacaatgttttgttatttgacttttaataaatccttttgtgccaccaactgtggaattatcttaagcaggataggggtaaagagaatgcagatggtcaatgtcagcaggagcagtgcgcttgcttctgcccagtcgttatgaatataatgcgaaacgaccggtcttgcaaagtgtataatcggtccatgaatactgagtgtgataatggaatatcgccccagataagaaacgatgcttattctttttattttcttacagatcagcataatcataaagattccggcaaatgcggcaatgtatacctggaatatgttgccgggataattgttggtccgcatacccggcgtggtggcggtgaagtacattacgaccagtgccagcaggacaaatgagggaataatcttgtcgaaccgatgactggggaacaggaagaaattatatcggcgaacccagaaacctgccacatagaaggggagggcagtcatggcaacgtctatatacaaaggaagttcgatgtgaaatttgcccaggaagaatcctgtgcatccgatcagtaacgttgctgcaaacatcagagataaatgcttgtcacgcagataatgaatcagatagaacaggatattgcagttgaacagagcaagcagaaaccagatgggaggattgaacttgatgaggtcgtgcccgtgaaagacaaacagtaattctctccatgacacagggagatggaaagtttccggtgcaatcttccatacaatgtattttagtagaaaggcgctgacgtagaagaagataaagggaatgattagcttattggtctttcggataatgaacccgtataatccttcataaggcttgaagaaaattcctgatataaagaaatagagaggcatgcgaaagcaggatagcatggaatgcttgtcaagttggtcgaaagcgcctccgatatgcgccatcactaccagaataatgcagactcccttggttaagtccacaaaatcaatacgccgatgctgattgtctcccatttattttgcgttgcgtttttgcgttgcaaagatacttgattaattggaaaaaacggaatgaaggaagataaagaattgccgcatgggagagaaacggaggtgtcaaaactatcagttgattttattcaggcacagatgacacggatttacagttttaagagattataggtctaaaaaacgtgttaatccgtgtcacccgtgcctaaagatatttatttcttgggagctctgccggtgtattttattagctcacgtatcttgtcattgagttcttctgctttcatcaactgttccagagtgaggtgcatccggtaacgccaataattgcgcggattggatggtacattaatccgttcttcctgcacattcggatttctccatttgccatcaatgctcagccagtcttgcagggacagaatacaaagtatggaattgcttttcagatgattgcgcaccacttcttcgcacaattcgggagtggcgactgtcggtgcggttccgtaatgccccagcatcgtgttgtagtaacgctgtgtctgcaggtaatcttcttcccaccagcctcgcaaagtagacatatcatgagtggagatggtacaaaccgaccggtatgggtattcatttaaatatccgaactcgtgcatcggattctttggcatccgctgaatctccagactgaggatacgaagatcattcatgacggacgaaacacaatccggaatcatacccaggtcttctccgcaaaccagcatacgtgtcgattgtgtcagttgcggtagtttcttcatagcctgttggcgccagaactcgttgtggcggtgataataatactgatcatacagtctgttaaacgcattctgctcctgttcattgagtgaacggaagatgaaatcgcgttgtattccgatgcgcggatgatatttatctttttctttcgtgtccggtacaaaaagaacatcactgatcaaagtgtatagtccatcccgaatccaaagactgttttcatcattctttcctgcaaagaaactctccacttcccgttgggtggtgaactccggtttcatgtgataaacaccgggtgtttcggcaggaagcagaaaagtctgtttcacataatcggtatgcggaccgaatacttgcccgaggaaggattcatgaatatatggaatcaaatattcttcccgaaaggggagtccgtaactttcgatttcctcccgactcatagggatggagggaatgaactgtccgagtaatccgtgtacggcatgcatcgggatttcccagatacggaagaaaccgaggatgtggtcaatccggtaagcgtcgaagtactctgacattttttggaaacgcttcatccaccagcggtagccgtccttttccatgacgtcccagttgtacgtggggaatccccagttttgtccgttcaccgagaaatcatcgggaggggcgcccgcctgcccgttgagattgaagtaataaggttcggtccatgcttccacactgttgcggctgatgccgatagggatatctcctttgagtacgacaccgtgttcgcgggcgtatttcgtagcggctaccaattgcaggtgcaggtgaaactggatataataataaagtgcgatgtgcgggtaatctacagattccggccggcacatcttctctatatcttgtgcattataaacggaatgtctgggccattcacggaaattaggtgtctgaaaggcatcgcgcagatagctgaaaacagcgtaaggttgcagccattccttattggcattaaagaattcgccgaactctccggaggctaatactttttctccttcctgcttgaagatcagtcggaagtattcccatttcgtttggttgacagcttcataatccatcgccggcaggccgttgagttctttctgttttttgttgaacttcgctgcggctgacttgtctttcagtgttcccatctgctttatatccgcatacatcgggtggaaagcataaatggagatactattatatggataagaatcggtccacgcatgagtcatggtcgtatcattgatcggtaatatctgtataaccttttgttgggtacttacagcccagtcaatcatgcgtttcaaatctccgaaatctcctactccgaaactgttctctgatttcagtgaaaagacagggatggctataccggcccctttccataccggaatatcgaaatatgcatatcggtcggagatgaccagcgtctcatttgttttcagttccgggtcggcaagatagcggttggggttattttcccagcagtctgctttcttttcttctttatggtaaaggatgaatttgtattccagcgggaatttcagcttacttgcatccagctcgatctgccattccggaaagttggcatcgctcatgggaatcgctttgtccgggtcccagtttcccaatgctttctgatttccgcaaattgccaggcaatagtctttgttgatgcgtggggcgtatgccttgatgaccagcccttttctgtgacaatgcggaatttcagctctgtcgggatgggctaacaaggcttccgtgaaggccgaactgtagtaatacaattgttcggggatatttttccagcagtctttaatctgatacttctttttagagttaccggataaaaagagacgtctcggaaaactgtcccattctttgcggatgatgatttggttttgttctatctgatagctgtaattgatagtcattccttctttgggaacttccagttccacgtctgccgtccagtatatgccgtctgtggtatgcatggggatcgactccggcagcagcccggcaatcctgacttcttctccccaactggtacgatattcgatgttaaatgatacagtcatatatattagattttgattagacactaatgactatgcaagtataagacatttttttgaataaaaaataaaaggagccgtattaggactccttttaatcttttgtttatatattaattaacatacatcacatgttaaccgcatctggaagcaccgcaagtggtacagatcagacagccttcctgatagaccaaagtttcattaccgcaattcgggcatttctttcctttggcttccgttccgtcctgaatatatttcttcaatgcacgttctacaccgttcttccaagtgttgatgctctcgctgttcagttgcagagaacctaccagcttgataacctgctcgatcggcatccggtaacggagtacgccggaaatcagttttgcatagttccagtattccttgttgaacttctctgacaatccttcgatagtcgtcttgtatccacgtttattttcgaactggaagtcgtaacgcttggttccatcctcgtctatattcttgataatacgtccgctggttacgcttttcggcaacaggataccttcgtcgtcatcttgcaaaccggtgaatatctcgtaaggatgtccatccagcagtcctacgaaagccacccatttttctttgttattctggaaacgaaccacgtcggcttccagtactcttgggcgtgtttctactaccgtaggcggtttgcaaggaggaagagtttctttcttatccgatttggttgaaatcaatactccggaacgtgagccgtcgcggtataccgtacatcctttgcaaccggatttccatgcttctacatacaggcggttgacaagatcctcgtctacatcgttcggcaggttgatggttacgctgatagagtggtctacccatttttggattcttccctgcatctttactttcatcaaccagtctacgtcattggaagtcgctttataataaggtgacttagccaccagctcgtcaatctcttcctgcgaataacgcttggcgggatcgtatccgttagcttccatccatgtcacgaatttatgatggaatacgatatattcttcgaatgcgtcgcctgtctcgtcaacaaagtcaacgtgtacattcgtatcgttcgggtttacttttcttctgcgcttgtaaacgggcaggaagaccggttcgataccggaagtcgtctgtgtcatcagactggttgttcctgtaggagcaatcgtcagacatgcaatattacgacggccatatttcttcatttctgcgtacagttccggatcagcctcggcaagacgctgaatgaacggattgttctgttcacgctcattgctgtatatttcgaaagcaccgcgttcttttgccatttcaaccgaagaacgataggcaccgagggccactgtcttatgtactttttcagagaattcggttgcttcttcggttccgtagcgcagacctaaagcagcaagcatatcgccttccgcagtgattcccacacctgtacggcgaccttgaccgctcttcttatatatcttgttccacaagttgcgttcggcatgttttacctcttcgccttccgggtcttgatcgatcttttccatgatacgttcgatcttctccagttcgaggtcgatgatgtcgtccatgatgcgttgagccagcgcaacgtgttttttgaacaattcgaaatcaaaataggcatccggtttaaacggatttactacataagaatatagattgatagccagcagacgacaagagtcataaggacacaatggaatttcaccgcatggattggtagatacagtcttataacctaaatctgcgtagcaatcgggcacagattcacggataatcgtatcccaaaataaaacaccgggttctgccgatttccatgcattgtgcacaatcttcttccataatgtggaagcatctatttctttagtggtagtcggatttgccgattcaatcggatattgttgtatataaggtttctcgtcaactgccgcctgcatgaaagcgtcgtccagctttacggaaacattggctccggtaacttttccttccgtcattttagcgtcgatgaaggcttccgaatccggatgcttgatagacacactcagcatcagtgcaccacgacgaccgtcctgagctacttcgcgggtagagttggaataacgttccatgaacggaacgagaccagtggaagtcaatgccgaatttttaacgggagaacctttcgggcggatgtgagacaagtcatgacctactcctccacgccttttcatgagctgtacttgttcctcgtcgattttgatgatagcgccataagagtctgctgcgccgtctaccccgattacgaagcagttggatagtgaagcgacctgatagtcattaccgatacccgtcatcgggcttccttgcggaacgatgtacttaaaatgatccagcagatcatacagttcctttgctgtcagtgcattcggatactttgcctcgatacgtgctacttcattggcaattctccaatgcatatcttccggagatttttcatagatgtttccgaaagaatcctttactgcgtacttgtttacccaaacccttgcagcaagctcgtcgccttgaaaatatcgtaaagattcttcgtaggcttcgtcataagaataaatttgtttttccacgatccaatgtgtcttagattttattatttaataagtaatgtgtagaagtttacttatcagtaacaaatgtggctgcaaagctaagaatgtttttttatctatcaaaataaaaatgcaacattttatcaacaggctttaagttttccgtttgttattgttaagtctttgattaacagataactttgctttttgttcatggctttaagttttccaaaaagaaaattagattatttcattgatatggcaaaataatatttctttttgtatctttgcaaaaaaaagatatgtttgaaaccgtaaagaacagaagaacaatccggaaataccagcaaaaagatattgctcctgatttgttaaatgatttgctcgaaacctctttccgcgcttctacgatgggagggatgcaactttatagtgttatagtgactcgcgatgcagaaatgaaagagaaactttctcctgctcatttcaatcagccgatggtaaaaggggcacctgtcgtgcttactttttgtgccgatttccgccgtttcagcaagtggtgtgaacagagaaacgctgttcccggctacgataatttaatgtcttttatgaatgcgtctatggataccttgttggttgcgcaaaccttctgcacgttagctgaagaggcaggcttgggtatctgttatctgggaacgactacttataatccgcaaatgatcatcgatacacttcaactgccgaaactggtattccctattacgacgatcacagtcggctatccggacggtactccggcccaggtggaccgcttgcctctcgaagctgccgtgcatcaggaagtttaccatgattatactccggaagacatcgatcgcttgtacgagtataaagaatcactgccggaaaataaacagtttatagaagaaaataagaaagaaactctggcacaagtatttacggatgtacgttatacaaagaaagacaatgaatttatgtctgagaacttgttgaaagtgcttcgtcaacaaggattctaatgataagtaataggtaatagctatgcggactgcacttgtttatgcagcttcgatattacctattacttaatacctattacttgaattatgctttcttcttcagcaacgactcaatctcctgtacctcagcctgaaagcttttatctacttccagttgaccttttacagtcttgcaagcatgcagcactgtcgcatgatccttattgccgatgaacttaccgatttttgaagttgagaaatccgtataattcttagccaggtacattgcaatctgacgtgcctgaaccacttctctttttctggatttggtgtgaatagccgatgcttccagatcaaagtgcttgcatactactttcagtatatcgtcaatggtaactgcttttgtttcgttgtgaactacgccgtgtacaatatgttgggctaaatccaagtctatttctttgttgaaaatagtagagcgtgccataatggcgatgacgataccttccaggtctcgtacactctcatttacattttcagcgatatagtcgatcacttccggtgggaattgcagaccgtcgcggtgtatcttgttccgcaggatgtttttgcggagttcgacagtcggtttttccagttctgccaccattccccatttgaaacgggtcaacagacgttcttccataccctgcaataataccggggcacggtcggaagtcagtataagctgctttccgttttgatgtaaatgattgaagatatggaagaaagtattttgagttttcgttactccggcaaattcctgaatatcatcaatgattaatacatcaattgtctggtagaagttgataaagtcgttggtcgtgttattacgtacggagtctgtatattgcacttgaaacagatgtgccgaaacatacaatactcttttatcggcatataattctttgattttagtaccgattgcgtttgccaggtgtgttttccccactccggacgctccgtaaaggaacaatggattgaaggcagtacctgctggattttgcgcaaccgcttctgctacgcttcttgaaagtttgttgctgtatccttctataaagttctcgaagttatagttcgggttcaagtgcgggtctaagtcctgtacggcaggagctttcaggaaactgggcgccttgttgccaccgacgatgcttttaggagtaacagctgtagaacgattgcttgcttcgagattcacggtttgattcggaatcgaagtcttgtcgaccatgacgttatacattaacttggtgccttcgccaatagctttgtacaatgtctttcgcagcaaatccacgaatttctcttccagtatttcatagaaaaactggctcgggatctgtacgatcaatgttttgtcctcatattttaatggaacaatcggggcaaaccaagtattatatgtcgtctctggaacattgtctttaattacttcgagacagcggttccaaagtacaacatgatttgattcaatcatagtgactttaatacatttattaaattaagcgaaacttctacgtttgcaaaattgggaatcttatttggaaaaaacaaattagctttttcttgtttttctcgggcaaacaataatgtgtttactttcaatgacttatagagttgtgtcggaacactgtctgtttcccctctcttgcaaaattataagtatctgtattttagttgtttatcgttttattcttgctcttttatacctcccgtacctgtttgtacgggaatattatttcggtctgtagatagacttttgcagaggttatactcccttttatataccgcctgcttatttagataaaatctatataagaaagatttgctacttgtctttcttcccgaataaagagaaatgaacgtaccgtttggggtgtgctttcaggtcttccagtaagctcgccgcattctctgtggtagcgttcagattgttatataaagcagggtcgttgaagagcagtccgatagtgttatctttgctgttcaacttctctgtaatcatttttacgttagcgagtgttgcgtcaactttttggaaaatggcgctgtagtccacttccttcaagttaccgctgatagctacaaaattatctccgatggtattgagcttgccggtcagctgcgggatatctttgctcatgagtcctttcatctgagagctgactatagcaagattggcggtagtcgtttcgatagagtgcagcgtagaagggatgctcttgtcacctacgatgttgttcagtgaggtgaggatagaatccagtttcggtaacatgctctcaatttggggcatgagtttcgctacgctttccatcattccgttgttcaatgtgccggggatggtgtcgcctatggcatatttttcacgcggattgttggcgagaagaatattcatgcgtacgcctcccatcagttcggatacaagttctgcgctacttcctttcgggatgcggagttcggtgtccagttcgacttcaacgatcacatttccgggatttacatagtcatattcgatgtcgcgtacaatacctacacgaacgccatcagcaaaaacagggctcgacttggtcagtccgtttacattctgaaacttggcatagaaatagcttgaaggctgaaacatatgtatgcctttcagccaattaattccatagacaagcacgcataatgctacgatacctgcaattcctattcgaacttcttttgtaatgtacttcattttattttctatttatttcttctttttttaaattcggctatcgcttcgttgacattcatcttttcgccgtttcggaaggcgatgatgaatgcgtctttgaattgtgccgagatggtacgcttggtgcgtaatactttattgtaatcactggaagcgccatacgtatatttgtacagtcctttttctttgtaataatccacatccttcagtcctttcagtcgtttgtcattcttagtaagaggctttgaggaggtgagtatctgtatcttaaacgttatttcgctgtcattggttgcgctttctgagacaataggtcgtttgggagctgtttttgtggcggtggcgggtgttgtacttgcttcggccatcagttccctttgttccggagcgcttgttgccggttcttcggttgggataattgttttgctggctccggtcaggcgtatctcctgttctcttttgtagtttaagaatgcgtggtagatgcctttggtcattgtgttggctccggcttccgagttgagatagcgttcttcttccggagttgagatgaagcccaattctaccaggatacttggcatggcgcttgctttcagcaccaggaatccggcttgatgcactccgcggtctacccgtttgcaggtatggcggaattgcttctgtacaagtgatgccagatgtacgctttgttccatgtatttatcctgcataaattcgaagataatgtaggattccgccgagttcgggttgaagccggcgtatctggtctgatagtcgctttcatagaggattaccgagttctctcgtttggctacttccagattggcatcggatttggccagacccagtgtccatgtagaagctcctttggcggtgcggttttttgccagagcgttggtgtggacagagataaagagatcggcttttgcgttattggctatttctgcccgtcggtccagggggataaagacatccctgctgcgggtatagatcactttgacgtcatcgcagttttttttgatcaggtttcccagtttcagtgcgacgttcagattgatgtttttctctttggatattttcccgatggcaccagggtcgtgaccgccatgtccggcatcgatgactactacgaaatctttcccccataaattgccgatacataggggagaagcaagtagccagaggcagattgatatatataatatgtaggttctatgcggtttcatatttaaatacggtgcaaatgtagtagaattttgcagaaaactcatgatttacacttaagttttgtgtttttttcggtttaatggtagcttttctcccgaaatctctgttactttgcatctccaagaaaaaatatacgacgatgcttaagtttttgaagaattggacgttgcctattgcgatgctggtaggtgctgtcggttatccgatatttatctacttttcttttctgactccctatcttatctttacgatgttactgttgactttctgtaaggtatcaccgcatgatttgaagcctaaaccgttgcacgcatggttgttgctgattcagatcgggggtgctttccttgcttatttattgctttaccgtttcaataagattgtagcggagggggtgatggtatgtattatttgtcctacggctacggctgctgcggtgattacttccaagttgggagggagtgcggcaagtctgactacttatacattgttgggtaatatcggtgctgctattgcggtgcctattctcttccctttgatagaggtaaatccggatgtaagtttttggggagcattttgggttattttgagtaaggtgttccccttgttgatctgccctttccttgcagcatggctgttgagtaaattcctgccgaaagtgcatcagaagttactgggatatcatgaactcgccttttatttgtgggcggtctctttggctattgtgacggctcagaccctgtattcgttactgaacgatcctgcggatggtttcacggaaataatgattgcggtcggtgccttgattgcctgttgcttgcagttctttttgggaaagactatcggctcggtctataatgaccgcatcagtggcgggcaggcactggggcagaagaatacgattcttgctatctggatggcgcatacttatctgaacccgttatcgtctgttgctcccggttcgtatgtcctgtggcaaaatatcatcaatagctggcagttgtggaagaagagaaagaaagagataaaatagtgaatataagatattgatatttagttatttgttgtttgtatctctcttttcctttgtttttcctattttcctacttatatagaggagcgtatagatagctatcattatggttcaacagaatatgattcggctgtaggagcattgttccttccatgaacagcaaaatatgtatgctggcgaaaagagaaaaacacctttgttttcttttcgccagcattatttttgtacttttgtcgcatataacaaaacgcaaatggatataaatcagaattatagagaagcggtaaagaccataaaagaagctattctgcgcagccagtaccgtgcagccacatcggtgaacaaagaacagctatctctttattacggcatcggacgttacgtgtcgaaaaattcccgtataggcttttggggtaaaggagcaatagagcaaatatcttctctgttgcaaaaagaattgccggggctaaggggattttcaacttcgaatataaagaatatgcgagttttctatgaagaatgggaacctgttctaaatcgccagccactggctggcgatttggtattagatgaaaaattgctgttgagcgtaattcgccagccactggctgatgaatttaactggtcagacttcttttcaatcggctttagtcatcatatcgaaataatatccaaagctaaaactttggaagcaaggctattttatatacatgagtgcgctattcgctattggagtaaatacactttaagggattacttaaaagcagacctgtacagccaccggggaactttgcctaacaatttcgcacaaacattgcctgatactaagcaagcgctaaaagctgtttgttcattcaaagatgaatacttgcttgatttcatcaatgtggaggaactggatgagcaggaagaggatttagacgaaaagatagtagaaaagtcgattgttgccaacgtgaagaagtttattatgacttttgggcaggatttcagttttataggcaatcaatatcgtgttgaagtggctggagaggaaatgttcattgatttgttgtttttcaatcgggaacttaattctttagtggcggttgaattgaagtccgggaaattccgcagttcgtatttaggacaactgaatacttatctttccgctttggattcatatgtgagaaaaccgcacgagaatccctctatcggaataatactttgcagagaaatgaatcaaacttttgtagaatttgcagttcgtgattataacaagccgatgggagtcgctacttaccgtacatccaaagatatgccggaacgacttcgtaacgccttgcctgacattgaggaactgagaaagttattgtagagcgaaagcctatctcttttttggcaggtaatttccctttgttgcctttgtacacgaagcccaccactaagcgattttcttcgtttttttgttacctgctattagtaataggtggatttatttgctgataatcagatttgtatggtgatgtgttaatatgtggcaaaatattattaatagctggcaattgtggaagaagagaaaaacaagagactgaagctaccttactgctgatagtttcctattgtagaaattgttttttgcttgatgaaactttagtttcatcgtcttgaaactggagtttcctctgcttgaaactttggtttcttcagcttggaactatagtttcatcgcatggaaaccaactagactaagctattctttgatttatcattccaaggagcaatatatgatagtagcaggatatgacagcaaagcgtgacggcattgtgacaacaaaatgtgctgtcacaatgctgtcacgccctgctgtcacctctttattagcttataatcagtgtgttatttagcttttggtgacagatgacagcaattttagatatttaaattctcatgtagaggtgaatttgttaaaggttaaaaaaggacataatttccgatttatgggacactatatttatctttgctaccagtttttaaaatcggaaaaatgaagattacgaagaagaaaatagcttggggcatcgttctcctgatattgattgccggtggtgtcatttgtaagatacgctggaaagtctggttccacaatatccctgaaatacgctatgtgctgacggaagacccgcaacgggtatttctgacattcggaaatgacggcgaactgtcccgtaatgtgagctgggtgtgcggaggcgtttccaagcaggcaaagctggaatatacaaagatcggttccggagatactcttctcgttgacggctcttccaaatttctccgtacactgggcgggttcggttatgccaactgggcaaaatttaaagaactctcttatggcgattcctactcttatcgggtatggaatgacgatcgctcatccgattggtattcgttcacgatgcaacccgattcgactgatcatttctcctttgtatttataggtgacgtgcaggatactttgcgtggaaagacacgtggctttatggaaaatgtgcgccatcgctatccgcaggcggacttctatatgtttgccggtgactttgcagagcgtccgatgaactgttactgggatgaagcctatcagagcgtggattccatagctcccaccaaaccgatattggtttctccgggaaatcatgaatatgtaaaaggactggtacgtgttttggagaaacgatttgcttatgtcttttcttatctgctcgaatcgaggtataagaataataatgtatattctattgattacaacgatgccactatcatcacgctggatagtaaccgtgatccttggttcctcttctctcaacgggaatggctggagaaaacgctgaaggcttcgaaaaagaaatggaagatcgtcatgctccatcatcctgtatattctataaaaggtaaaacgaacaaccttgccgtacgctggatgttcgacggactgttccgtgaatatggagtagacttggtgcttcagggacatgagcataactatgcccgtatgactaataagaacgatgagggcgaaatgaccaccccgttgtatctggtaagccacgcttccccgaagagttaccgtctatctttcaatgataagtatgatcgtttcgggacggaccgccgtttctaccagcatatcgacgtgacgggagacacgctccggatgcaagcttatctggagaatgactcactgtacgatgatgtccgtattgtgaagaacgcttccggcactcaaatcattgacaatgcaaaagacattccggagatacttgaaatgcctgcaaggttgagtggaaagaaagccgaagagttcgaacggaatgctgagaagtggaggaaccgttccttagtaaagtaaatacttctgtctcatatcacggtaggtctgcaactccttttgccagctgtcacggatttcctcttccgattctcctttaaggatcgctttgcgtaccgaatccgttcccatcagtaagtcaaaccatcggggacgggagaagaatgctgcgccttcgccggataaacggtagaaacgcagaaagtaacggagcgtgaaaccgtttacgtctgttacgttccgtaaatcttcgccataacaagtgactcctttgtgcatcggatttttgtcgaatcccggcagggagcgcggagtgaaggcaaaatcgccatactttttgttaggtgtgcctaacacctgaaaaggaaaggtcgttccgcgtcccacactgacacgtgttgcttcaaaagggcaaagtgaggcataaaggcggatggattgtgcattgggcaagttgggagacggtttcacgggaagtgcatagggctgtccgtgtttccacccttttacgggaatcacagtcagcggacaagtctttgcctgggtagtcatccatccttctccattgatcatctgcgccagctctccgatagtacaaccgtgaagaaccggcaaaggcagcattccgacaaaacttttatatccggcttttaatacaggtccctctacgtaatcgcatggattggggcggtccagtataatcatctcttttttgttttccgcacaagcttccattacataatacatcgtactgatatatgtatagaaacgtgcgcccacatcctggatgtcgaacaagattacatcgatatctttcagttgggcggcagtcggttttttattatctccgtagagcgagacgatggttactcccgtacggctgtcttttccgtcttttactgtttcaccggcatccgcgttgccgcggaaaccgtgttccggtgcaaagactttcactatatcgattttttgttttaataaagtatccagcagatgaattggctctgtgccgacgatggaagtgtggtttaccaccattcctacccgctttcctttgattaacggcaggtattgatccatacgctcggcacccgtaattacttttccactggcgtatgtagaacacagtattatgaacagagagaaaagaatgagggaacttctggcttgcatatcagtaaatttttgtaatattgcacaaaaatatcatttatcagtaagggaacaagtaataactagtgaaaaagtatgaatccaatagaaatcatcgacaaattttatccgcaggatacggaacaacgacacattctactaatacatagcctttctgtagcccaaaaagctttgaagattgtagatgcacatcctaacttacctatcaaccgcagctttgtcagagaagccgcgcttctgcacgatataggaatctttatgaccgatgctcccaccatccaatgtttcggagagcatccctacatcgcgcacggctatctgggtgcagaccttttacgaaaagaaggttttgaacgccatgcactggtttgcgaacgtcacaccggagccggactgacactggaagaaatcatagaacgccagcttcctgttcctcatcgtgagatggtgcccgtcactctggaagagcaaataatctgttttgccgataaattcttttctaaaactcatcttgacgaagaaaagacagtagaaaaagcccggaaaagcattgcaaaatatggtgaagaaggtctaaaccgctttgatgggtggtgctctttgtttttatagcactaaaaaataattaaataacggagattctcacgcattattgatgaagattgtgtacttttgccacttcaagcgtaaaactattagttaatggcgccattgagagcaaaaataattatatcattcatattgctgattgtcttgctgatgcttcctgatgaggctacgtctcagcgtcgaagaagagggatgattgcctccaacactgcacaaacggattcccttaacaggaaagattcgttaggggcggatacagttgtggtacgcgttgactctgtagcaccgacaaagaaacaaccgctcgatgcaccggttatttatgaatctaacgactccaccacttttacattgggaggtgccgctacgctttatggtagcggcaaagtcaactatcagaacattgagctggcagcggaagtgatttccatgaatctggacagtagtacagtacacgcctatggtattaaagacacgacgggaacgatcaaaggtaaacctgtctttaaagaaggtgaaactgcatacgatacagaaacaatcagctataacttcaagagcaaaaaagcgggaatcaccgatattatcactcaacagggtgaaggttatgtgaccggtagcagagccaagaaaggagcaaatgatgaaatctttatggagcacggtcgctacacgacttgtgatcatcatgaccatcctcacttctatatgcagttgacaagagccaaagtgcgccccaagaagaatgtagtgacaggacctgcctatcttgtggtggaagatgttcccctgccgctggctgtgccgtttttcttcttccctttctccagcagctattcttcgggtttcattatgccgacgtatatggatgattcaagccgtggtttcggtctggcggaaggcggatattactttgctatgagtgacatcatggacttgaagctgacaggagatatattcacgaaaggttcatggcggctttccggattgaccaattataataagaggtacaaatactccggtacattgcaggcggattatcaggtgaccaagaccggagacaaaggaatgccggattatacggttgccaaagacttcaaggtagtgtggaaccaccgtcaggatgccaaggcaagtccgaacagtactttctccgccagtgtgaacttctctaccagtagttacgaacgatctaacatcaacaacctttataactcccagttgttgactcagaatacaaagacatcaagtatcagttactcccgtagtttccccgatatcggtctgaccttgtctggaacgaccaatattgcgcagaccatgcgtgactcatccattgcagtaacgcttcctgaccttaatattacattgagccgtctgtttcccttcaagcggaagaaggctgccggagccgagcgttggtatgagaagatttctgtcagctatacaggacgtctgacgaacagtatccgtactaaagacgaccgtctgttcaagaccggcatcagcggatgggaaaatgcgatgaaccataatattcctgtcagtgctacttttacactgttcaagtatttgcaggtcaatccttcggtgaattatacggagcgttggtacacccgcaagataaatcagacgtataatgaggaaacagggcgtttggaacagaatctgaatgatactattaatggcttttatcgtgtttccaactattcagccagtttgtctttaagtactaaactgtatggtatgtacaaacctcttttcatgaagaagaaagagatacagattcgccacgttgtcactccgcaggttggtatcagtggtgctcctgcatttagtaaatactgggaagagtatacggataataacggaaatactcagtattattcaccctatacgggacagccttttggagtcccttcacgtgagggttcgggaacggttagtttctcgattgctaataatctggagatgaaatattatgatgctaagaaggatacattaaagaaagtcagcttgattgatgatttgagtgtgaatatgtcatataatatggctgcaaaggaaaagccatggagccccttgagtatgaatcttcgactgaaactgacaaagaattatactttcaatatgaatgcatcatttgctacttacgcttatacgtttgataaaagtggtaatgtggtcgaaggtaatcgaactgaatggtcgtatggacgtttcggacgttttcaggggtatggttcttcttttaactatacctttaataacgatacctggaaaaagtggttcggtccgaaggaagacgagaaggataaagacaagaaggagtcagaagatggagacggagaagattctgaaggtacggaagatggaactacgaccaagaaagtagagaaggcgcaagccgacccggatggttatcaagtattcaagatgccttggtctttaagtttcagttattcatttaatattcgtgaagataggactaagcctattaatcgctattcgatgagatatccgtttacttatactcacaatatcaatatgaatggtaatgtgaagatttccaataactggtcgctttcgttcaattcgggttatgactttcaggcaaaagagattacgcagacttcctgtacgatctcacgtgacctgcactgctttaacctttctgccagcctttcaccattcggacgctggaaatactacaatgtaaccattcgtgctaatgcaagtattcttcaagacttgaaatatgagcagagaagccagacgcaaagtaatattcagtggtattaatgaaggaaataaagaatagagaataagtccggaaggataagatataaaaacggctgcatgatcttttgtgatgacgcagccgtttttctttatgtctcaatccggtctatcggatttggtattaccatattatttccgtttctccgtttgctttcagataatcgtttgcacggctgaagtgtttgtttccgaagaaaccattgtaggcagaaaggggagagggatgggcagagctaagtaccagatgcttgttgcggtcgatgaaagctccttttcgttgagcataagctccccacaggataaatacaagatgttcccgttcttctgccagtgcgcggatagcggcatctgtaaaagcttcccatccacgattctgatgagagcctgcctgatgggcgcgtacagtcagagtagcgttgagcaataatactccttgctcagcccagcgagtcaagtttccggtagtaggagcgtctgtacctatgtctgcctttatctctttaaagatgttgaccaaagaaggagggaaaggtactccgtcgtttacagagaaacagagtccatgtgcttgccccggtccgtggtacgggtcttgtccgatgattactaccttcactttgtcgaaaggacagaggttgaaggcgttgaaaataagttttcccggagggaaaatctgatactggctatattcactttttacgaattctgtcagtgtgcgaaagtaatctttttcaaattccggctgtaagtgtgttttccagctttcttctatttgtacgttcatagcaattatataaggtgtatatcaagttcctcacattctttgcgcatatcttccggccagatgctggcttgtatttctccgatatgagctttgcgaaggtagaacatacacaaacgggattgaccgataccgccaccgatagatagtggaagtgtgtcgtccattaatcgtttgtggaaataaagtttcagtctctcttcttcgttttcttctttgagctggcgttgcagcgcttctttgtctacacgaacacccatagaggacagctcgatggagcgttgcagtacatcatcccaaagtaaaaggtcaccgttcagtcccggcaggttgttcaggccggtggatgtgtagtcatcatagtccggtgcacgtccgtcatgttttttgccgtcgcttagtttgcaaccgataccgatgataaatacggcaccgtatttttggcagatggcatgctcacggcatttgggttccaggttcggatagagttggcgtagttcttccgaatggataaaatgtaatttctgaggcagacaaggtttgatctgcggatacatttcatataccatgtattctgtacggatcatggcagcgtagatacggtttacgatctctttcaggaaatctacgtttctgtcctcgttggtgatgacacgttcccagtcccattggtctacatagagcgaatggaggtttccgagttcttcatcagaacggatggcgttcatgtcggtatagataccgtatcccggttcgatattgtaatcggcgagagttaatcttttccatttggctaatgaatgaacgacttctgcttgtgcgtcacctaaatccttgatagggaatgaaacaggacgttctataccattcaagtcgtcattgatacccattcctttcagtacgaaaagaggggctgtcacgcgtctgaggcgtaattcggatgacaagtttaactggaagaactcttttatttgtttgattcccaactctgtttgttttaagtcgagtaacggtttatagttctttggttttatcaagtaactcataggattgttgattgttaattgtcggcaaagataggaataatattaatatctgtattggatattctctaaaagattgtcaaattgataaagtatatgctctaaagcatttcaaaataacagaatgttaaggggcaatactgacttaagaactataaaaaaagatgaatcattaggaagatgagaagattttttatacttttgtcatcgcatttaggaaatggccccgtagcttagtgaatagagcgtcagattccggttctgaaggtcgtgcgtttgaatcgcaccggggtcacatgaaaatcccttgataattagcagttatcaagggattattgtttttatatgacttttatcctagcttctcgatacctgcaatcctttatcggaaagcgtcatttcaacaaagcgtgcacgcggattaggagcctgttcggtcaatatccgacggatgcatccggccgcttgcggatctttagccaccatatataagtaaccgccacctcctgcaccgggcaatttatatcccagcgtataatctttgatttgttcgataatggctgctactgccggtggattcgtgccactgtccaatgcttggttttgtatccagcttttgccgacaagattgccgaaagtttcgaaattacctcgcaggatagcttcgctcatatccatcgcatgggctttcatctctgctaataaactaagatgctttccggagttaaggaacatggaactgacaatttcagctaagatgcctttggctgtacgggtgattccggtataataaagcagatggcaatcccgatattccggctgcacaaagagctggtcgggtaaccaccgtactaatggatgttgttcgaagccggattcggattgcaacagttttacgccggggaatacgccgccgtattgatcctgccatccgccgccggtggtaagtaattgttccaataccagtgtataattgcagatgtcgttcctatcccatgccagtccgcaaaaatcattgatagctccgagtacggtagatgcaaggatagaactggtacctagtcccgaacctgccggaatggcagccagtaaagtgatttccagtcctgaaccgaacgcttttagatgttcttccaatgacgcatgagattccgccgcaaataatggggcaaatcctgccaaggtaagtgctgccttcggtatggagaaaggcgaaccgactttcttgtaatcctgcaattcctcataacttcggataacctccacagctcccatatcaatggaacgaagtacgatatggaactcgtgacatggtttgacgtatacttgtaacggcggctgcccattcaactcaatcgccagattgactacacttcctcccgaatagagagagtaaggaggtgtatctgtccatcctcctgcaacgtcaatgcgcaccggactacgtccccatacgatctgatccgaataaacattgagcttcggatagttcttttttccggcaacggcttccagtaatccgtcacggagtagctggaacgcagcttgttcttctcctttgcagccttcattgccttgcagcttcaggatacgtgcccgaagcatacggttatgtatacgcaccatgggtgcggcatcctctttcaagacagcgggaacatccagattgagccggacaaattcattggctgcgtcttgcaagtcaagctgatagaatacactcttctcataattggcggacaatcctttccagttatccctgcggaaagcgctgcgctgtgcgtaaagacgttccaggttcgcttgtgccgatatctcgtcagcggatagtttttcagctctcagccataactcttttccttgttttagttgtggctcagctgtcatccagcgtattaaaatacccagttcttcgatggaagtcgttacggggaaaacaggagcagcttgcagatcatctgtacgtccttttatgtcttccagcccaatctctctttccttcatccactgtgtgaaagagttccccaagtaggtggtcgagtcatttcttaaatcacctttgaaaacatcatccagcccataaggccgtgcgacaaaggctgcgtctcccataggaacgatgtcgatgcagactccgtccggcaggtttatattccaatggttttcgggaactcctgtaataatctgtcgtgaacctaatttccatccttctcctacgtggctgttctcaatccataaattggcgttctctgcagataacttcacttgggtaaacgagttttgtataaagatggcaggattcggttttactttccggtgcatgatacgcctttggtcacgcactttatcctgtatggcgagtgtggaagaaatcagttcccgactcgttccgaaatgataaaactctccgccgggtaaaggcaggattgctaccgaaagtttgtttacttcgtcgtctgtcgtttggggatgctctcccagtgccaggccataatccgaatataaatcgtagtagctgatatcattcgtgccttcttttaatgaccgtttcatcaatacctcaacggcacggtcacttaatatccatataccgatatccatcaggaaaagatgggtctttgataatccttccaattcctctaaagaaggtttctgcaacatgaagtcgagcacttccggcttcttgcggtccgatacgaatactccgtggtgagtagccagtgaaggattcacccataaaccataacatacgacatctacttccggaatgttttgcagcggtttttccgaacggatatatacgtctccgctggctatcagcgtgttcaagcctttcggagcctgcttcatgattctttcgtatagcggaagttgcagcgacagcagattctgtcccagcttttgtcctctctcccaactgaaaaccggtatgggagtcagtattttgcccgaaggagcatagccgggcaagcggcggctttgtcctcccgcatgcagcaaaatctttttttcgtttccaatccatttgctgaaagtctcttccggtgcaaaagcctgatggcaggcctgcaacagccaggtcgttcctcctccggagcctaacttgctgcctacagggtctgatgtacaaaaccagtcagtatgattcacttcttccagttgatgaaaactgtcaattaagttgggaggtaaggataataacttttgcatagtagaatcggtatttataggtttataacatgattgtatcccagctatcgcagagtgcctgcatagaaggaaacagcagatcggctccggcatccagcaacacctgtccgtccaacggaccggtattgaccgcgattgtgaaaattccggctttatgtcctgcttccacgcccaatggggcattttcgataacgattgcttcgtcagctttgaaccctccttttcttaatgccatcagataaggttctggattaggtttgccatatttcacgtcaaaagcggtcaccattagctctttatgaaacattcccggaaaattgtgttccagacgttccaacaaagaaagctgtcccgaaccagtgactaccataggagtcagcccttcactctttactttctgcaaaagttcccatgcgccgggcatacgttctgcttccggataagaattgaacaggatacttttttcgtgatatatactttctatttcctcttgtgtggcctcttttcctaattcacgttgaaatacgatattgatagtcgatgcccccgtgcgtccttcgtgcatatatgcttcttcccggctcagatcaaggccgtgagttttcatgacttgatgccatgcttcggagtgatagggcatggagttaaagagcacgccgtccatatcgaacaggacggctttcagtttctttctcataattgggttagatggaatctgtttgatatttattcttttttcagcatatctttcagttcaggcacggtgatcactacatcatgctgagcttccgattgtttgccgatatatctgtagactatatttctgtcacaattcacacaacttttgataaacagttgggtagcaagatcggtctgattgcctaatgtttcgataataccttgtttcacctctgcggcatttgctttaatctggttcatatcacacagatcttcgtcaacacgacagatataaatcactgcttcatcgctgagttcgattttctcgatcagaacgtcctcacttgcctgtatcgggaactgtaagtttgccatctgtacctgcgtttccagtttagccaggtcgctttcggtggtgtcgacatccttattgagaatttccttaatttcatctgttgtcagttcgcagactacctgctctcccgaatctttacctatatatatcatttgcaggcccgctttacattttacaacaaggtccagcaatgactttacttctttattcggattctggaacatgattttcagggaagtcttcatgctttccggatttttctgcagagtcttgatgttggcagcctcttcgttcagataaaaggtatacactacgttctctccatcatagacgatgctggtgatttttccggtctctcccatgtctatcggacattgtttgttggcagcctcgatgcctgctttgagtttgatttcctgacaaccggtggttaacatcatcagtagtgacaagctgataaacaatatcactgcattcggtcttcttactaatttttccattgttcttttatttagaattcatttattcttgggataaaaagagatatacgaagcaaagatagtcataaaaaatgagagatataacagaatggaggagatagttgctggttgtgttttggatgataaatcgtatgataatttgtcgtttagaagataatatgtatttttgtagcatgataaaactagtcaatagcatgaaaaagaaagtattgtttctgctgccattgtttctgggtgcttgttcggatagcggagaaagccctgttatcacgatagaaaagctatatgtgaaagtagatcaaggcgatggagaaaccatccgcgaagactatgcaaaccggatgagtgaaatgcctgctttgaaagtgggagataaggtggatgcgtttttgatcttggacggcaatggagccgaactgaaatctttccagcttcagaatggggaagagatgaagactgagctccgttatgaaaagacagaagtcactaccgaaggaaatctgacagacgaagaaaaagggcagttgcgcttcaaagatggcgtgacaaagactaaggtgctggttcatgccactattgagcatgtagataaaaatggtgatgtacaattatctttttatctctcttcaaaagcggagtgtgaaggagcgcaggaagtgattgacttgaaaacagaagtcgttgagaatgaatgaatcctgaaagggagtgagtcactttaacgtaacgaaggaaatataataaaaagaagcggtctccggagaggccgcttctttttattgtcagttattggatattacagtttagcctgaatagcctttgattcttcttcgtatcccggtttgttcagcaaagcaaacatatttttcttgtatgcttccacgcccggttggttgaaaggattcacgcccaacagatagccgctgatgccgcaagctttttcgaagaagtacagcagaccgccgatgttgtattcgctcagttccggaagaacgatgcgcatgttgggtacaccgccgtctacgtgagccagctgagttcccagttcggccattttgttcacttcgtccacccgtttgccggcaaggaagttcaggccgtccagattagcttcatcgaaaggaacttccagtttatggtctactttatccagtgagatcacagtttcgaagatcgagcgttcgccttcctgaatccattgtcccatagagtgcaggtcggtagaaaagtcaacagatgcggggaaaatacccttgttgtctttaccttcggattctccgtaaagctgtttccaccattcacttacgtagtgcagtttcgggcagaagttgacaaggatttcaatcttcttgccttgtctgtacagttcgttgcgggtagcagcgtagatagccgcagggttttctgcaaacggaacgtcagaaccgcatgccttttccatatcggcagcaccggcaaccagtttgtcgatgtcgaatccggcaactgcgatcggcagcaaaccaaccggagtgagcacagagaaacgtccgcctacgttgtccggaatgataaatgtcttgtatccttctttgtcggcagtcacacgtgcagcacctttcttggcgtctgtcacggcaacgatgactttcttggcggtttctttgccgcgttggtcttcacattgctttttcagcagacggaaagcaagagcggtttcggtagtcgttcccgatttggagatattgataacgccgaatttcttgtctttcagatattcggtcagttcatacagatagtcttcgctgatgttatgtccagcatagatcatgacaggagcagttttcttgtcctgcaaccatgtgaaactgttagacagcgcttcgattacggcacgtgcgcccagatagctgccaccgatacctgctacgatcactacttcgcagttgtctcttaatacttttgcagtagcgttcaggtcagccagatgctctttgctgatggacgaaggcagatgtaaccatcccaggaagtcgttaccttctcctgttcctttttccagcatttcctgtgcagcttttacctcggcttcataagcagaaaccttttctttggagatgaatccaaatgttttttcaatgttcaagctaatcatatctatcaattttaagtaatatgtaataggtaataagtaataggtattaagtaataagtattaagtattatgcatgagacgcaaagcttaggtggctacggttaatacctaatacttattacctattacctattatttatttttctcatctaaaagaatcagtcagcaatttgatctctatcatgggtgagatgcgttcatacaagatattgtatacggcatccagtatcggcatgttgacgtggtgatgcttgttgatctctttgatgcacttcgtgccgtagtatccttccgcgatcatttccatttcaatctgcgcacttttaacggaatatcccttgcctatcatcgaaccgaacgtgcggttacggctgaagttggagtatcctgtcaccaataagtctcctaaataaacagaatcatctacatttctgttcaggggatgtactgtattcaggaagcggttcatttcctgaatcgcattggatatcagtactgcctggaagttatcgccgtatttcagtccgctgcagatgccggcggcaatggcgtatacatttttaagcaccgaactgtattcgatgccggctacgtcgtcgctgacggaagtcttgatgaagctgcttcccaaacggcgggcgaagatgcgcgctttgtccttgtccgggcaggcgatggtcagataagagaggcgttccagcgctacttcttctgcgtggcaggggcctgcaaggacagcgatgttttcgggtggtacgccatattcttttgtgaaatattccgatacaatcacgttgtcatcgggtacgattcctttgatagcagtgataataaacttatccttaatctttgttttcagctttttcagatgagctttcagataaggagagggggtgacgaaaatcagtgtatccgattccttcacgacatcgttgatgttagaactgaaagtgatacgcttcgtgtcgaatttcacccctgtcagataggcgggattatgtccaagtctcttaaaatcggcgatgcggtcgtctcgtcgcatgtaccaattaatagagtcttcctgagccagacacatctttgcgatggctgtagcccaacttcctccgcccattatcgctatcttaccgggtagtttcatatttagttgaaagttgaaagttgaaagttgagagttgaagattggaagttgttgcttgaacaacattttcaattttcaactctcaactctcaacttatttaagtttatttatccactcggtcacgtcgttcacgcttggattggtcagttctaatttgtatttcttattgattccgcagatgtcctgatgcaacttttgcggattaacatcctgcatatcagctactgtgttgtagccggctttctggatgaccggcacccagtcttctgcaatacccagttccatgtatttggtggcagggtctttcttgattactttctccggacgcatttgcgggaagaacagtacttcctgaatggtggtctgtcctgtcatcagcatcaccagacggtcgataccgataccgatgccggatgtaggaggcataccatattgcaaagcacgcaggaaatcctggtcgataatcattgcctcgtcgtcacccttgtcggcaagacgcatctgttctttgaagcgttcttcctgatccagcggatcgttcaactccgagtaggcattggcgagttccttgccgtttaccattagttcgaaacgttcggtcagtcccggtttggaacggtgcatctttgtcaacggtgacatttccaccggataatcggtgatgaaagtgggctggatgtagctgccttcgcagaattcaccgaagatttcatcaatcagtttgcctttgcccatggtgtcgtcgatttcttccatcttcagttctttgcagacctgacggatttcttcttcgctcttgccgttgaggtcgtatccagtcttctctttgatagcgtcgaggataggcagacggcggtaaggagctttaaagctgattgtctttccgtctacaacggtttcggtgcttccgttcacggcgatacagatgcgttccagcaacttttcggtgaaactcatcatccagttgtaatccttgtactgtacgtaaagttccatacaagtgaattcggggttgtgggttctgtccattccctcgttacggaagttctttcctatttcgtatacaccttcaaaaccacctacgatcagtcgtttcagataaagttccgttgcgatgcgcaggtagaggtctatatccagtgagttgtggtgagtgatgaacggacgtgcgcttgctccgccggcgatggattgcaggatcggagtttctacttccgtatatccggcttcgtcgagggcgttgcgcagtgttctcactacggtggcacgcttttcgaatgtctctttgatgccgtcgtttactaccaggtccacataacgttggcgataacggagttcggggtcttcaaaagagtcgtaagctacgccgtctttatattttacgataggcagcggtttgatagacttggcaagtacggtcagttttttggcatggatactgatttcgcccatttgtgtacggaacacgaaaccttcgatacctacgaagtcacctaagtcgagcaggcgtttgaatacagagttgtacaattccttgtcttctcccggacagatgtcgtcacgtgtaatgtatacctgtatacgacctttagagtcctgcagttcgatgaacgaagccttgcccatcacgcggcggctcataatacggcctgcaacagaaacctgacgcggttcgtcttcatctttaaattctgcttttatatcagtagagaaagcattggttacatactctgcagcggggtacggatcgatacccattgcacgaagctcattcagactattgcgccgaataatttcctgttcacttagttctaatatattcatttcgttatgtattaactcaattttggaggcaaaaatacgaaacttttctcatatatcctgtaatccgtctcttttttgtatctttgcgccctcaaaacaataggtatgacaggacaaaagacacccactgcgctgggtacggaaaaaatcgggaagcttttaatgcagtacgccattccggcaattatcgccatgacggcatcttctctttataatatggtagatagtattttcatcggtcacggggtgggggcaatggctatttcgggcctggcacttacgtttccgctgatgaaccttgcggcggctttcggttcgctggtaggtgtgggagcggctacactggtatcggtgaagctgggacagaaagattatgatacggcacaacgggtgcttggcaatgtgctggtattaaatattatcatcggactggcttttacggttcttaccctgatctttctcgatccgattctttatttctttgggggaagtgaggcgactgtcggctatgcccgcgattatatggtggttatcctttggggaaatgtcatcacccatctttacctgggcctgaatgcagtacttcgttccgcagggcatccgcagaaggcgatgtatgccacgattgctaccgtggtcattaatacgatactcgaccctatttttatttacggctttggctggggaatacagggtgcggctatcgctacgattaccgcacaggtcatcgcacttctttggcaattcaaactgtttagtaataaagacgaactcctgcattttcataaaggcattttccgactgaaaaagaagattgtttttgattctctggccatcggtatggctcccttcctgatgaatcttgccgcctgctttatcgtcatccttattaataaagggctgaaacagcacggaggggatctggctatcggagctttcggcattgtcaaccgtctggtattcctcttcgttatgattgtgatgggtttgaatcagggaatgcagcccattgccggctataacttcggcgccaaacagtatccgcgcgtgacgcaagtgctgaaaataacgatttatgccgcgaccattgttacaaccatcggttttctgatgggaatgtttattccgcaactggctgtttctatctttacgacgcacgaagaattggtgaatatctcggcaaagggcttacggattgttgtgatgtttttcccgattgtcggttttcagatggtgacttccaacttcttccagagtatcggcatggcgagcaaggctatctttttgtctatttcgcgtcaggtgcttgtactgattccttgcctgttgattcttccccggttttacgggcagctcggcgtgtggatcagtatgcctatctctgattgccttgccagtctgattgcaggagggatgctttggtggcagttccgtcagttctcactgtcggctgataaaactcattaaaagtaaaccgaagactcctttactgtaataacttatctttcttacttttctcaaaccattctcactacgatgagaaaattttctcactgtggtgagaaaaaattctcattgcattgagaaaaaaatctcatacctatgagaaaatcttctcattgtggtgagaataatactacttagtaatagtctgataatgattgcttatctttacttttaccaatcgtatttctctatgtatttatcgaatgcaggcttaaacttgattccatgttttgagaagatggcggcaatttgcttttgttcgtcagggtgtaaaaggcgctctttgttgcggatgcgataatacatgttacgtcccattagggagtacatttctttgcgtatggtgacggccatggcatgcggaatgttatcgagcagatgatccatgccggaggcaaagaggacagtgcggaacggactgaaaaaagtacagttggtttcgttgcctgctatgtggtttgggtttactgccgaatagtaaggagtcgtttgcggtatgcagagggcagcctgatagcggaggcatttgctgtggcgtggacatttgttgtgggtacagtataaataattcttggggatgtcattaaagtctatctgtgtgtgcatgattcttgaatgcttttatagtttgttgttgctttattttctatttatattcagctcattggagcaaaggtagtgtttctttttgatataaagaaatatagagaagatatagtgagtgtatttgagacatatatgtctcgaagataaattcctggttacttgcacttcccgatttattaggttacttttgtagcgtattaaatgaagaaaggagataggtgagtatggcaagaccgattaaagaaactccgatacttttcggagaagatgcacggcggtttgaagagcggatgaaagaaaaacgcagggagacccccgagcagcgggcaaaaagattgaaggactatgaactggcaatgaaaatatttaaaaaatagatatggatcgtcagttaatagagacaacgtatgagatgcgtaaactagatacctcagaaaaaatagaatcgttcgattgcggagataccgacttgaacgattttattttgaatgaatctttcctgtatcgggaagctttgctggctgtcagttatgtacttgagaataaagttaatcagcgatcagttgcttatttcagtcttgccaatgacaggatctctttgtctgattttgaaaataaaactgaattcaatcgtttccgcaaacatcggtttgtgaatgagaagcgtttaaaaagctatcctgctgcaaagatttgtcgtttgggtgttgacttgtctgtaaaaggtcaatcaataggctcattcctattgaattttattaaaagttattttattattgagaataaaacaggttgccgttttttaactgttgatgcgtatgcggctgctgttcctttttatatgaaaaacggttttgtcccattgaatgatgaagatgtggattctgctacacgtttgctctactttgatctgaatgatattgtgaaataattcagattctgttctacttttatataatataaaatgatggattggtaatgttaattgttacaacatagtcttttgaatttatataatagtgacgattgctttgtttctaattttccccaaacatttattagccccttttgttattttccgaaaactatttgtaactttgtcatcggaacgtagcataccgtttaaaggtgtgcgattgcgcgtttcctcggctaataggaaattgtaacggatttttttgatgtatgccgggaagacgcctgtacttctatgacttctcatagggtacgggctgtctgcccgtatacatcaggtagccgttactacctcctattagcgggatgtgacagctccgtactcttttataatataaaaggtacggaactaggtaagagtattaacttagttccgtttttttatgtcctattggctcacaacaaaacaaatgtctgaaagacatggcgttcaggaagcaactctgcgaaactgggcgaatctcggttacattaccagttgccggatgggcaaccaactgttcttggatgacgaaagtctgactgcctatctcgaagctcacaaaaggcttggattgcaagcggattatctggcaaagattgtggaagagaaaaagctggaacgcgactttattatttccagatatgatgatctgctatatgtattgcgaacacagaaaacgtgtaaacctctatatgaaattattattcgtgaactttcccaattgattgttcatcccggagcccgtgatattttctactccatctctatgggggagtcaatagagaaagttgccgatcggcatcgaattacttatgacagggcgttacagatttataattctcatctcagaggactgaaagtgagaaagaatgtgttggctacttatcggaaacatatcatagatgcccgttttcagtctttggcggataaaagcaagaatataaatttgaatcaggaagaaagggtactccaattgtctgtcggcaaagtggccgatacgaggctgactaatgtcttgtataaagaagaaatccggacggtagggcaactgctggaattagtatcgggaaagggatggagatggctgctgaaaatggaaggagtagggaggatttcttatgaccgcttgctgtccaatcttcagttggcgggagtggtcgatgaaagtttggagcagatactttccggtcgttctgacagatgatgaggggcaaaagtcaatagtattaggagagttgctactgacttttgacatctcctcgtctctttgtggtgatgattcttccgttttttagggtagactacgcatttgattcttttgattaaaaacgttttatctttataaatttattctggtacccctcaaatatatgctctgacgtttcattttccaatttctcttcaatagcgtttactattgtgaaggggatggtttgcccgtcttcatttaaaatcctgaggttggttctctttccatctatctctctaatattcagtagtatataaccttcttctttagagggggtacatgaagtcatcaggaaattgtctttctcaaaatggaaggctgagtactctgtgggtttatgattctctgttcctgtcggcattacccgggcatatagaggaatacgtgagctccagccaaacttggtagcaaggttgctagatgggtcaacggaagaggtcagatggtaactccaacggaactctccttcttgggaagctttgaagttggtattccagtaattattcatcacccacgagtagacatgaggcctttcgtattgtttctgatattgaaatttaccgagatttatgtctcctagttgatagagggggatgaggctgcttcctataataatttgcgcctgattattttgtaccgatacaaagttttgaacagtattccagtctgtagatgtcccttccagttgattcttgccagatataactgttccgccctgaacgtcgaatgccagttttccttcgggcagttggaagggaaaagcaacgtatatccctgagggatccgtttccggcagacgcttgattgcgtactccagttctattcgtttggtatcatgatataatttaatttccagattgaccccgaatgcttcgtctgttcccggagattttccctgcaacaggatacgttgataaataggtccattcgaactgtcgatgatccggcactcactcaatcctgttctgttgtaatcatccaggcgatattgggccaattggtcacgattacctaatttctcatagataaaagcacccagttcccatggagacgaactatcgaccagttcacaattcaattctttatcatacaaactttggatcgttcctttgtccgggttgagttgtagtttgtagaaatgattttcgatactggcattgtttattgtaatagttcctgtatcagtagacggttgtttgaagacaatttcaaacgtcttgtatcccataggcggaatatcctctgcgaaaattgcatagtagcacccttctctgcgataacggatcggttgaactttcaacgaatgtccttgaaagtctgttatttcgaagaattggtttcgggggatcacttcaaaatcaatatatacagtcagcatctccgaacgtttccagttcaacgtattgaaaatcgtaagggtcgggttcttgcctctgcggaggtctccttgaagtaaaccgacggaggtttcatacagcatttgtgttcttttgactgcttcccatgcataggctgacttttctccccattgcacctgactgttttcgcacaacggatcactgacgctttcggatgctccgaacgtgtgttcatcataaaatagcaggctttcatgtatgtgctctattcgttggtgagtggtctgtggcaggcatttgtcttttaatacagccatagacagtagcccttctaccgctgtcatatccgaatgagttttgcgtgaagctgctgtttctcttgcggcagaaccgaaaccgtctgtccaccagtctggatatgcggctctgtatgcgggaattttatcctcgtatcgcttcgttacataatccagaaattcggatgcagtggcacttcgtagcttaggatatgcgtacttttcattccactctctgatgagtttgcattcaatgatggagggcggtgaattatccgtgaaataaccggagtattgtacgcctactgcatcaaacggataatgcttacgctccagttctgataaataatgtagtaacttcggttctgtcttttgaatgtctccctgctctattccccagaaattgccggtattataatggtcggcacggtaagtcaggatcggtttacctgacggagattcccattggaagacagtcggcatattaaacggaacctgcgatttgtaatggtgttctcccatccacaggtattttatcccgaggtccggcagataatctgccagacaccatgcaattccgttgacgtcattctgcatggccagcgcagagggaattccatgttttctgaattctttgacaggctgaaggaaagtcttgaaagagttttcgtctacaatctccgacatattgaaatacatggatgcaacttctatttgtccttcggcaatgtatttttttagtttgttcacttgttcttccggtctgtttttcaaatactcgtctacagcccacgccgattcgcaggtccatctgaacttcgcatcatctgtgtagtcttttgtttgttcgcagtattcaatggcataatctatataccggagatgttccgacaggatttcggtttgaggtttggtgtagcctatatctgtgtgagtatgctgaacgagatatactgtccatttcttgacaggagttgccttttcattgattttgctgacggtttttccttgttctttcagtatgatcggtaactcacatggagcggtgacttccggaatggatgtctcaatgttatttattccgggggacaatacgtatctttccggtgggaaattaccgacttgcagttccaccggtctctttttatgatgccagttgactgcttttattttgaccggctgtctcagttcttttttctttccgaccaccaatacaggagagaaggcggaagatacgagactggctttggtcgtaagattgtttgtttgcagaggagagtcagatgtcagctttatctggtcgaatgctacccaactgcctgatatatttcggatcgtgagtgtgttgtttcctgctctgaactcatcagccggaatgtcaagcgtgacggataactcttttgaagttgtttcttttgtgtccagatattcagggtttgtgcctttgggtgtttggatggatttctcgaagctgttgagcctcacctccagtcggggaggtgaggaaggatgagtttctgcaaatagaagtcgtagttgtatttgggttgtcggagaaggagcttcggccaatgaaaagccaataacagcctgccctgatatgccacctgcccaggcatcactaggccccggcagaaagtaaggaaaatcagcagaatgatttctccctacttcgtatagataaacatcattgatgtagttccgataatcgtttttatagaacttgaactctttggcggatttatctttgtttcctatttgccagactgtattttgagaatgagctgtgagagttcccaacaatccgatgatacaaacgatttctttaatttttatctttctcatgtgagttccttttagaaaatgatatgccgttgctatatcttaattagaattcgtatgtatcaggtgaccagctatccagccattgaatagccatgcttccgtcttcacggaactgtataggcaaccagatataggttgagtgaattaggtctgttttattccatttgtcaaacatggctatgtatgcgtctttctttccttgaatcggcagtacatgggtactttgtccatagaaggttttgtcggcatcttttcctacacaaggatttccttttacggtccatggtcctaaaatttgggtagccactgcatattccgcttcattgggactccagccggtacatcccgaactgatgacgtagtatagtccgttgtgtttgaacacagcaggggcttcccggaatttacctgcgaaattgcgtgtgaaagtgccggaaggtttcaggtaatcgtcggacagcaaactgatatataatgtagaattctgttcggaagagtagatatgataagctttgccgtcgtcatctttgaatagggtcatgtcccggctgatttgcccgttcgggtgcatcgaacccagataggtgaaaacaccagtcggtgaatcggaaacagcgactccggcagcagctttattgtagtcgtcactgtccacgtgcagccacattacaaatttcttggttttgtcattgtatataactttaggtctctccagcactttggaaggatggagatcggattgtgtgtcagatatttccggttggagaacgagtccttcatatttccagttgagaaggtccttggaagagtaacaatttactccaccggcttccgtacgataacattcccaaccgggaacattgggattccagtaagtggaatcacttttacattcgccataccagtagtaaattccctcgtgatataatataccgcctccgtgagcatttattttctcgttgttggtgtcgagccattctactcccggagtgatggctgtatacttgtgtgatgtgtcacgtgatgactgacatgataataaaacggctgctgtgataagactgagtaagatctttttcatttgttactattttttttatgatgttatttgattccccaatttttattcggacgatctcccatttcaagttccaatgtgccgcctttgagcagttcttttgccggaaacttgaaagagttcaacttcttgccgtttagtttggcggactggatgtacttattttcccgcgaagtattgctagctttgatgataaattgctttcctctaccgaaatgttttcccaaatctatttttattttttcaaacagaggactccccagttcataaacaggttctgcgttacaacctccgtccgtctggaataatcccaatgcagccatgacaaaccaagcgctcatttgtccttggtcttcgtctcccaaataggcatttgatgtgtcaaagccataatagcggtcgataatggaacggctccaccgttgcgtttgccacggttggcctgcccagttgaatagaaaggcgaagtgcatggattgctggttaccttgtactactggaaagtcccaatactggtctcccggggcattatacctccatggctcactggctttgaatccccatgacagccggtcgatgaagagctctttaccgataatttcggtgagtgcgggaacgttctgaggtacaaaaaaagtaagttgccaggcgtttccctctacataatgatggttagctcctgatttgaacggatcaaagttcttttcccattctccattgctgtagcgcatttgggcataacctgtcgccgggttgattgcgtttttccaccagttgcctctgttggagaatgttcggtaatattcctcttttcccagtgcttttgctagttgagagactgtccagtcgtcataagagtattctaatgtgttagaaaaacgtcctttgtcggcaggtacatattgatgttgcagataagtttccaaatctctgttgccggcaaacccattggctacacgttgagctggggtagtttgcatctttacgattgcccggaacattttttctgcatcgtaattccgtattcccatttggtaagtacttactaaaaggggaatctcatgttcggccaccattacaggtatgtatttcattccgctggggccttttgccagccatccgttggcgtcatacatagccaactgcgattttacccatctggatgaccactcgggagcaatcagattccatacctgattcagattccaaaaagtattccagaaggcatcgcatcccaaagcgacagcatccgggtcgtccagcttttgaatgttgcctgctgcatccacccatctgcggtctgcatcactgaaagtattccggcagaaagcacggtataaattggtgtaaaatcttaccttttcccgataatcgttgctgtatatccggactctgtttaaaatattattccaactatccgactgatgtttgcgtacagcttcaaaattccacccgaatggttccattatctcattggaaagattgttggaagcccctgccatatctacataagatattccggaacgtaccataacttccggatgatcggtagtatcaaattcggcataacagccgaatcgctgagggtagctggctgtcatagtatctgtttcccataaagtatgatcgtgccatcctccaaatttcttgatatctttattgaattcaatcacgaaataaattgtatagttctgatccgcatccgccgaccatacatttttggatagctgcttgctgaatccttcgatccgtcgtgctcctgtttgctttatacttccttcaacaatttggtaatcgtattcactagggattttcaggtcgatcatgacacgggcatccttatcttgcggatatgtataacgctgaaaaccacaccgggaggtggcagtcagttccgccttgatttgataatcggtcaagtctactttataatatccgactttcgtttcttcacttgttttgtcgatggctgaacgatacgaattggcatctttgactaaggaagactggctgcctatctccgtttttaaaggaccgttggcaggcatgatgcccagacccgccatggtccattcgtgtatgtggctaaacgtacctatgctctcgaatgaaggatcatatcccgattgccaaccgctatcctgattgtccggacttaatttgaccatgctgaatggcatccacggacctggtgctatcatccaacgggagtgcgcagttcccattcgtgtatcgatgtaatcggccagtgtgattgtattgtgaggtgcgcgtctgatcattcctttatctaagattgcaccatcggcggatatgatgtaatggcttgtcttgggagacttgacaactggcatcggagcttctagtatgtatcttcctttttccaaacgttgttccagtatcttttttccatctactttcacttcaaggagaggatgcccggaaagatgttctatgtctactaatagtggttgggctacaggactggtggtttgaaagtccgcagctttaacatcccggagataaacggatttgttgacttcatttagttcagcattatccggccccataagtctgatatcatcgaagagaatccatgagccttcgagacttgtaagcgcgatggagttgcttccttttctgatcactccggagttcagaggaatttcgatcgtatgcggtttgatttgtgaatagtcaccgtctattgattttccacttcctttgggaagtgcatatttccatgattttccgttgatcgttattttaaatagtgccggaaattcgtggtgagtatctaataggtctatgattaatttccatgagtccgtttcgggaacttccttcataccaaagagtatgtttaaaacatgagtccgtataccggcagtataacttgttcctccccaatgatcggcaggtcccggcagaacataaggaaaatctttttgaggggaagacaatccaatgatataaaacctgtcctcccaaccaaaatcatttgccagaaactctttgtatttgtcaggggacaatgccaactcactggcactatgatttttctccccgatttgccagacagtcttggtaggtgctgcacataatccggataggaggaataaaaacgtgaataaactcaatggtattcttttcatattaactttcggtcttttggattcaagatacaaatttgttttttacataggaatgtatcattctttttttgtatacactcctatgcaaaaacaaattcaactgttatcactgtaacaaactaacctttttaccccagaacttgatttcgctggcggaaccataggcccccattcctacgtgtggagctgagagtgattctacaatacggtatctgatgtatcttatattttcgtgttctttatcgcaggcgaacttaatactgggttgccaaccggaaacagaaatgttttttgtagtcagctgtttccatccttttgctttcgcactttcttcccaagccgggtttatagatggaacatccggttcatggctttccaggtcttctacatcttcaattccccatatttggaataatcgaggcatccagtctgttctttcatatccggtaaagaacagttcgcattcggtaatcgttgctgtaagtcccatgtcaatggtcagatgatgaggaactccttgattatcgccggcatgataaccgctgtcataattccatgtatcattgttccataacttttctactgaaccgccataaccgtttacaacatctgaaggcatatttgcgttggcaaagttagttctggggatttctacaatcggatcgtcgggcaaagtgtattctgaaatgggcagggatacgatatccaatgctgtttcgctgggtaggattcgtgtttctactgttaatatagaagtagctttccaatcaggtaaattggttgaagcagcatctcctttcactgttaaagttagtagttgctcatttgaatcatagtacttaactattgcttccaccacattgtctgcctgattccaaattaagttgagcgagttgtcggcaatgacgaattgtatatcggtaattcgcttgggataataagtcgctatgtgctccgttccgtatacatctacattgtaggtttcggatagtgaggtattaccttctttatcctttgtggttattttaacgtaatagttgccttcttccacatctttgatttcataactgaattcaggttgcgttctgtcaatgtctgttgtgaaaaccttgtcgtaacctacaagttctattatgcaagtctttgctgtggctagatatttcatagaccccgttatcatcatacgctgaaatcccggatgtatttttacatccgccagctttcctacataaatttgttctccgtctttgatatattcagaataggtatcatgaatatctgtgcaggaggtcatacacaggagaatagtagttattatatatattacttttttcatttctgtctattttataaggttattcttcaccttggatatctccccaaagagtgatttctgacataactgatgtttccattcccgaccatgacattaaactctggaaccggaagtagcgaatgaatggtacatcttggttgagggtaaatacatggcctctttgggcttcctcaatatcttcctgagtaagcgcatcaccaaatgccccgccggatggtttcttcatttctccatcaaataataccacccagttatccggattctgcaaatctttaccctcttcgcagccatataatttgaagtacttgggagctccatgggcatataataagtcttggctgtccagacgttgccagaattggaattggctgagacgtacattgacattcaaatcaatactgaaggcatgcgggaaaggtatcgggtattcggtatgtccccagttccatccacctatttgcccgtcccatagacgggaatgataaccttcgtggtaatcccagctgacatcatccataactttgacaagttggaattttgttttatctaataagctttctttccaaggagtaatttcggcatacaatgtgtcggaagtgttttcccatttatccctaacgaagatggctaatttcaataatttatgttctaagccttttatagtcaggcggccttcttcctgttgtgaggagtatacgtcatggatctcgtattcattgtgctcatctacccatttgtaaatgtagaaagataatgcacttcttgctgcattattgaaatcgaggaagaaacctccaaaactttcagtcacttttaatgattcttgtgtctgaacgactgcaggagtcagaggctcaatagtcacgatagccggtgtggaatagttttcgtggcggtctacagagtaaagtttgacctctctcttttgtgtatcccccagcccttctattaccaaagaatctacatacatggaagatcttacttcctgctgttctccgcgggtattagtgaagatagctttgacgtataataaatcgacatcatcggaaggagtatatttaataatagctcctccgtttacattcttcaccgatatattagtaatcggtgccggagcttttccatcattcgtaccgcgtggttcggcctcgtaatcaccggcgcagtttgcaaaacaaactgctgcaagtattaaaagtataaaagctatatttttcatctttgtcatttttatgttaaaagttaccattgaggattctgaacaagtttcggatttctgttgatagaattggtcttaataggccataaataatctcttggcatgaattttctcgtgaagagaactcgtgcattataaaagtactccgggtcctgctctaataccgaccagccttttatctgagtattcagatatgtagagcctaacttccatctgcgtacatcatggtaacgatggccttcgaatgcaagctctatcattcgctctttctgtataatttcacgcattcctctttgggtggttggcttatccgggcggttggaatgattacgccatgtatttaccaaagaacctccttcatccagaccggctttattcctgacctgttgtacatagtagtatacatctgtagtcggagtttcattaagctcgttgagagcttctgcatatagcaggtatagatcggacaggcgaataatcgggaaagaatatacgtaattgatattggtcgcactggtgtttacgttttgataactaaccaatttctttgtgaaataacctgtcggtgaatatagttcgtctgaaacgccggcaatatctcctttctttgatttgataggataggagctcgtttcattgtcgttacagcattcgatggagaaccattttccaccatcaaaaccaatataggcataaaaacgaggctctctgtttaaatgcatcttgatagttgtgtagtttggtgtaaaatgaataggatcatcttctggagttgttgtcagtttatatctgttttcatattcataatctttatcctcatccatcgggactccgttcgctgtatagaattgttctacaatttctaatgacggcacaagttgtgagcaactacgaatcattctgttccccaatgaatagctggttaaatgcgcttggcatagattctgtattccatctgttgcattggaacctaatgcccatattatttcagaattaaaacgaccggtaattgtgttacgtagtgtcaactcttgttgtaaagttgatgaaggagtataatttagcttctcatcaaatttgtataaagaagctccggcttcgtgggcagtgttgatggcatccaggcacgctgcggctgccgcctcccatttttcctttttatactcttggtcgaagaaaggtatcccttctgaattgacaaattcagcatacatcgtattgccgttgaataaaggactggcagccagtattagtaatttagccttgattgctttcgcaataggtaatgtgatacgccctaattccgtgcgtggagaagtcacattgaatgttaatccggaagggatgttcatggcttcatccaataaatcagttgtataagtgacgatatcattaatcgtttctctctccagttgcatcatatctaagtctgcttctacgctgatgttctctttaagtaaaggaatgggcccatagtgcaacatgagataataaatataatatgctttcagagtcatcacttcggctttccatttatttttctcttccatacgcatgtcaggtacgcgatcgatgttgtctataaaaatattgcattcatggattcctctgaatatgttgtagcctccctgacctccatcccagtaatttagtaaggggtcgttagagttttgcataccacgtgcaatgttgaatgaggttatatttttatagtagtgggactctggtttcagataccacatttctccaccgcagatgaggccggagttgtgatcaagattggctgctgtaggtacgaagttatagcaggtggctaaatatttttcagcattagcccgagtgttgaatgccatttcaagcgttgcgatattatccggcacgatatcaagatagttgcaggatgtgattaatatcgccaataatgtactagtgaataaatgtttgtatttcataatgtaatcagaagcttaagttaataccaaaattgtaaactgcctgaataggatattgcattccgtcgtttccttgttctacatcccataatttaaaacgattccatgcgaaaagatttagtccgctggcatagattctcaaattggacatacctagatggctggtcagccttttaggtaatgtatatccgatttcgactgattttaaacgcaagtaagaaccgtcgcgtaaccaccatgtactgtttctgttattgtttgcaatgtcagtagttgacaatcttgggaaagtagcgtatatattacgattcgattcagaccagtaatcatccgcatatgcttgcatcataccattgaggttatttcctccgaaatccatttgcatgaaaggatttgttgctttggaattaataaagaaagaagatctcgctgctccttgaaagaaacaagaaatatcaaaattcttgtatcccatcgacactccgaagccgtatacaatttctggagaagaggaaatccctattggaacaatatcttcatcattaattattccgtcattatttacatctttgtattttatgtcaccgggcatatattcaccatatgtctgaacaggtgaatttgcaatatcttcttcatcaatgaacagtctttccgctattaatccataagtctgattaatacgttttccaatatgactaagccaagggtaaggacgatagggttcttctacatgctcatatttgcctgttgcataagtgaaattgccacgcactcctaaccagaagtttttattgaaagcgtggttggcatctacctgcacttcgaatccatgtgaagaagcttctcctttattagcataaagaggtgcactgaatcccatttcatacgggatggtttggcgttcgccaaagatgttttttcgatattcggtgaagtaatcgaattgtatgtcaaatatattaaatagcccaacttcgagacctaaattcattttttgagcaatttcccatttgattttgtcatttcgatagcgtatcatgtcgatagtaccgacattccgttcaaaatcttgtccccaactgaaatttgcaccactaccgtttagatttacctcggacatataaaagaatctgtcattccatgcaccaatattgtcgttacctaccaaaccgtaagttccttttagtttcagtttattgataatattcttaaggtcttgattccaaaacttttcttcggagatcatccagcctgctcctatcgaaggaaagagtccgaatcgttcatttttggcaaatctttcggaaccattgtaaccaaagtttgcttcagcaaaatatcgtccgtcgtatgcgtatgtaaaacgacctgataatccaatgttacgggctggtaaagatgtctgtatcgaacttgcgcctccgctcttattctctctcagaactcctactaataatccggtgatattatgcttttcccggaacgtacggttgtagttgagagatgcttcataataatacgaactgctgacttgattcccttctgctgtataatccaaatcttcccgtccaccattagggttcagctcccttaaagtatatgtgtcggttagtttatcataatagctgattgaataataaaagggtgaagtagaacgttgttgtccgctgtatgaatttcgggtagtacttgcgaagactttgatactaagtcctggagttataaaatctaatttctgatttaattccgcctgggcagaaataaccgaattggtgtattgtttgtaaccacgtatcatttccgcatagggattgatgtaattaccatcacctgcgttaccaaataaaatatgtgaagtagatgtatgattttcatcaggcatataatatttggggaataaaacaggacttgttgccattgctcttcggtatagatcattgccgcttacaataggaccggtataatcatcaaaattgccactgaattttacagaaaatgtagtcgtcttggtcacatcaatatcaatgttagaacgtacatagattttttttaaatcaatgttactgttataattgtttcgtttatctaccttcatgataccattgtcatccgatatgcctaaagaaacataatatctggcagtttcactacctccgctcatattgatgttggcacgtgaattaaatacattatcattaaataattcattgtaccagtctaccgccggatatacatagggatttttgccggctattgttgatgctattttctcatcggtatgaggccggacagctaacggattacgtgtgagtacagcttcattgtggtatttcatatagctgataggatctaccatgtctattctttttgtaggtgctgacaatgaaccttccactctggcactaatttttaccttaccgggtttgccttgcttggtagtaatcaaaatgactccattagctccgcgtgcaccataaatggcagttgctgttgcatctttcattatagagaaagcagcaatgtcatctgcggacagtctggaaagatcagtagtagatgattcgatattatcgattaatatcagtggacttttagagtaaccaaaagttgtcacaccgcgaataaagaattccacattgtcatttccaggttcaccggacaactggtaagatataattccggcaacattaccacctaaggcttgagtcagattactggttggaatttttaatctttcaggttttaaggttgatattgctccaatcacactttcttttttctgtttagcaaaaccaaccacagtaacttcatccaattcatctacctttggcaaaagtttaatggtttgaggtactttatctatcttgtattcaatagattggtatcctaaaaatgagaaaatcaaaatagagcctggttcggatgaaatagtaaataagccatctatatccgaaatggctccttttgttgatcctttcacctgtacagtagctcctgcaataggcaaatctgtttcatccacaattttccctgatattgctttggatgagttgttactactactggtttgagcttgcaaggttacatagctttcaatgattagaaggaaagctatccataatacgaagcgtggtaagttgcataaaagcttcttcatactctgtgattttaaaaagtaagtcataagggttttatattagatttaatgtgatttcttgtatataaaggctgtatattttaatctacatagtattaattgcttatgatatatgtattatataatgtctatatgtatatacatattgcaaatatatatatttaaagcaggaaaactagaaagatttatttatttaatataaatttatatatgaatggttgttttgagaataaatgttaatgcggctttgtgtgtatggttttaaatttatgaaacgaacataaaattagatagattacacaaattagcatgacaaggatggagcctgattggctttcggtataatctgcgcaaactcccatgagaggaggaatgatggagccaccggatatcccagttatcatgagtcctgatatttcgttggttttatagggtaatgtatgcaaggctagcgagtagatgacggcaaatatgctagacattgcaaaggctataatgcatactaataacaaaataatatattgagaatgtatccaataaatgcaggacaaagctattaatacaatgaacatattgatccgataataataaatttcggaaaactttgctaatagaattacaccacataaggtccccaaagtgcgagcggcaaaataccagcttgtaccataacttgcgatttctttagtcaactctgcattttcaattaaaagttttggggtaaatacattcattcctacatctaagccaacaatacaaatgatgcctccgaataaaaggcagatggttttatttttcaggagagaaataacttgatagaaactggatgttaatcttttgtcgtctttctcatttattggagtgaaaaataaccagattccggaaattagagtaatggcggcgaatatgggaaacattaatatccagttgttgaaataaacagagcagaatccggccactataggtcctacaaaagaagatagtgctttgatgaattgtccggctgtcataatgcttgataattttccttcagcgataacattggttaataaaggattaagtgacacttgaaggatggtatttcctatgcctaaaagtgcaaaggcgatataacaggctgtctgtgtgaatgtaagtaatggaagtaacattccaataaaagtagataaaagtcctatcagtgatattgtttttctacctttcttgtccatccagatagaaatcggaatagagatgagtaaaaaccatataaataccattgatggcaggaaaccggcttgggtttcgctccaactgaaataatctttcgcataggtgactgatactcctactaagtcacagaaccccataataaagaaaccaaaaagaactggtagtatcttacttttatttttcatatgtgtttatttatttaaatgcatttggatttggtcggtcacccataatgaaatgaagtgttcctccttttttgagtttactccattctatatagttattactaaggcgcttgttattgaatcttacatattgaatgtaacaattgtctttggatacattttctgcttttatgataagtttttttccagagtaataggtgttgtctaacagaatttctacccggtcaaatcgcggactccccagtaaccatacaggatctttgctgcaaccgccatccatttggaaaagtcctatgctgcttaagatgtaccaagaactcatttggccttgatcttcgtctcccggataggcgtctcggggacccattccataatatttttcttgtatagcacgtgcccatttctgggtgtgccacggctcactggtataagagaagaggtaagctgcctgcatatttgtttcattcccatgattaataggataagctcccatattatctcctaaagcattgaagcttactttttcggatgttgcaaatccggcattcagccggtcgatgaattgacgctctcctattaaattgatgaggctttttacatcatgaggaacgtaccaggtgaattgccaagcgctgccttcgcaaaatccgggagcatgatatgggttggtgttttcgatccactctccgttgggacgtcgggggcgtacatatccggttgatgggtcgaatatgtttttccagttatcagaacgtttcataaatgtattgaagtcatcttttttattaagagcgtcaaaatattgagcagcgcaatagtcttgatatgagtattccattgtattggaaacgtatgattgataatgcggagaattccaatcccatgcgtcatcgtatagaggtacataacctttggttatataatcgggataactttcgttaccgacttgtcctcctccgggatagtttatcatagtggctgtttgttggtgaattaatgcccgatacatgagttgactgtcgaagtcacgaattccatgttgatagccggagactatcaatggcaaagcaggattgcctatcatgactctgaaatatttcataccgggattaccattgggaagccagccgccacgacgatagaactgctcgtaagtgtaaatccaattggacatgtactccggatagagaagattataaaatggacctaatgtccaatgcattccccaagcagaatcacctccatatacgcttttacctggcttgtctataagagctttgttaccgttcatatctatccattccccatttacatcattccagatggtccgtggactgatagaacggtaaagattggtgtagaatttttgctttaagaggtaattgtctgttgtgatactgactctttggaaaagtgtttcccaggtatcttgttgattggtgacaactttatcaaaattccatccgaatggtctcgctatttcttcttccagatttagccgtgcgttatcaatgcttactaatgaaatacctgtccttaccataacatcatcaccagtgttaaggttaaagtcgaggaagattcctgcgtccagtttgtcttgactgttattttcgactgtaaatacctgtcgggacttcatgtttgatttatgtagctgttcaatttggctatatactttgtttcgtatccagccattcattgttttgaatggcttatcaaactgcatgacaaaatgtaatttatatctttgtactccatggtatcctgttgaccggcaatcgttcaaggtccatccctctatttctgtgtcagatactttttttacgtatacatcatctaaattccagtcgtattctgctggaaagaaaaagtcaactagtattcgtggctgctctgctttgttgaatgtgtatcgctgaagggaactgcgggtagttgctgttaattctgcttggatattataatctgtaagattaacagaataataaccgattcgggctgtttcggttttcttattaattcgggagcgatacccatagtccggctgtttttctgttccgggttgtatttttaaatctcccgtagttggcatcattaagagtcctgtcattgtccattcgtgaatgtggctgaatcccattatgttttcaacgttatattcatatcctgctttccaatgggcatcttcgttatcgggcataagttttaccattccaaatggcatccatggtccggggcctatcatccatcgtgaaccactggaaccagcaaactgatcaacataatcaattgatctgcgtagttgctggttactacggataaattcttgagttgctactgtttgtccttctgttgatattttaactttgattttagactggtctttaagttttccggttggaatttcgtagatattctctccttcttctacttgtttgaatatcttcttttggttgatttgtattttaagtgttccggattttttagttatagttttcagtagaagaggctgtgttcttgttttcccttgttctaattcataatcagccattttcattgaaataataggagtatcacctatcttattgatttgtgtctcttgaggtccgtttaggcaaatggcgtcaaaagttagggatttaccgttgaataactgcattacaatcttgttgtacccttcctttagaattccgggctgtattgaatatgttagctgtttggtgccaggctttataggagaatcgtaattctttccgttgacttccagtcttaagaacatacagtcttcgtattctacattctctataaaaatattccattgatatttctttagcggattgacatcggatagttttattaaaataggaagttgtatcctgcattgtcctgcccagtaagatgagccagcccattcagcagtaggccccggtataatgtatggaaaatcggccggtgtgtgttcgcctgcataaaaatattttttattatccccaaatccggagataataaatcgatcttttccatccggtgctaaggcaaactccttggatgaattatctgttttgccaagttgccagattgtgctgtattgtggatatacattcgcaatacaatatatgaaaaagataatttgtacaatagttcgtttcatagtagttggataagatgtttttattaagacattatttcaaagtaacttctttttttacaaaggcttttaccaacattattcttttgtcgggattttcatttatgattgtatatgatcgggcagcagcagggatgacaaaagtctctgcataattaaagcgttgtttcatgccgtcctctgtttcaatgcaaacggagtctccttctactatcatacatacatggcatgtattttctgtattcatttgaatacggtctttgaaggtgtaacgatatacatcataaaaatgctctttatgagtaggtagatgctctatagtacactcctgattttctttcatgatatatggatggcatatcaattcctggattactttttccccttttctttcaaaatatagattattcattccgtgttgaatgtttagaggtcgtggtttcccgtctaatcccatgcgtatccagtcgtacattttaaatgtgaaaatatagggtgcgctacttatttccaataccacgcaatcttttcctgaagcatgtatggtgccattgggaataagaaagaaatcgtgctttttagcttggtgtttttgaacaaacctttctatctctaccttcgttgctttttgttgacttcgttccaaggtatattggaattcctcagggacgatgttgtcttgaaagcctaaatatacacatggcgagtttttacaatccaatatgtaatatgtctcatcttgggtgaatggcatgttaaaatgctcttgtatatatcgggggcgtggatggcattggatagaaagattatctccgtcaaaggtgtctagaaagtcgaaacgtatcgggaaatcgtacttaaatgtttccgaacattctcctaatatattctgataatcactatacataagaaaatcgaaagatacttcaagccgatatccgtcactctccagcattagtccgttttcaagtaccatcagttcaaaagaccatgccagattatttacttctttatttaatccttgaatatgatttttcatccattgtcctccccaggcgccaggctcgaaccatggacgaactctgaagaaattgcggctcattttgtgcaatccttctcgtaggtcatttcctgaaatcattaatagttcatcccattctctttgtccgtcaataagtaggtcaatcagaggcaggcattgctttttgtgcttattaagaacaatccagtctacaaaatatagttgtttgtaagcctgttgattgtcttttcgataatctaatcctaaattattgatggctccggcgcgcattctaaactgaatctcatttttaggaatatcaatataaatcaggggagctttccattgagatagggctgctcctgtacctataaatatatttaaatctgcttccgggtcaggttgtatggaattaagcttattttcatcaaaccaattaaccaaatgcttatcagtaatggtgccgaataacggattatctcctccaagataaggagcaatcattttttcaatagtctgtggatctttcattgctacactggaatgaaagaatcgcacattctttcctctttttctgagttcttctcctaacttaatgattaattcatcccaaaagactccaatataaccatctatttttatttgggaatgcttttctatccagtcagctagttggtttatacctttcccaattttgccttttcccaatggaaatgccgggtatatatcatattctcctgatggggtggcagtagagttagtaggtgcaataaattgctgtgtgtgtcttttctcttttgtattttccatattttcaagtatgttgcttgtgtaaatagcagatccgattaatggcgacatatcccataatttacagatatctattttagtgattaaattgagtttctttaattgaaactgaatattatctaaaaagaagtcagaagctttcgctatatttcctcctataataagtttctccggtttaaaatttagcaggaatggggttatgaattctacgaaatttgaagcgaagttttcaaataatgactgtgcattattgtctccgttcgaagcgcgtagtgcgatttcttttacgccagttacctttttatctggaaatagcatattccatgtatttacaaaccatcttgtcgaaaaaaagtcatctgccattccgtctcggtaaggtatgttgtagagatatccatgttcaggtattccttctgtcagttcgttcaaaacagtatcattttcaagaaatgtacttccaagtccggtgccgattgtgactataatgcttctacttgtgtcttttgctgctcctgcataatactctccaagggcataagcggatgcgtcatttatgaaaacagtattcaggtcagatacttttttaatttcttctttaaggttaagaccgaaaagtgactgaaactttggcacaccataaatggcaactatacctttggcatagtcgcaaggaccgggcatggctataccgattccgcctaatttagataggggcatacaggcttgaatgtcagtaataacttttctgactttcgtaatgatgcttgatgttgaatctgtggcattcagttcttcgtgagatagtatgttttgatgaatgtcattcgttagaaggttgacgattccaccttttatatgtgtaccacctatgtctattcccaaataatacttcatagttattatgatttaattaattagtatgtctgaacatataaacatttgcaaatgtattctttttcttgaaaagaacaaaaagtattgcctgtttttatttttatttttatctttgtaaaaaagttaatcatgaagatattagttaaccataacagcgcaatccccctttatcttcagatagaagaacagttgaggactattatcaaaggggaggaatataaacaaggtaaaatgcttccaaatgaaattgatttgtctaaacaattgggcatatctcgtaataccttgagacaggcgattaataaccttgtgaacgaaggattgctgatgaggaaaaagggagtaggtacagttgttgtaaattcagctgtatgttccaaagctcagaattggatgagtttcacacaggaaatgaaaactttgggaattgtaccaatgaattatgaacttcatgttagctggacaaagcctacagatgatatagcccttttttttaatgctcctgatgtaaaaagaatactgaagttagagcgtttacgtggaaatcaagaataccctttcgtgtactttatatcctattttaatcctaaaataggtttaacaggaagtgaggatttctccagacctctttatgagatattggaaagagattatcatgctattgcaaaagtttctaaagaagatattagtgccaggctggctgacaagtacattgctggtaagcttgagataaaggtcggagatccaattttggtgcgtaaaaggtttgtttatgatcccgaagggtgtccgttggaatggaatataggatattatcgtgcggacagttttatttattcacttgagtttgagagaaatatttgatcttatactcataaaaaaagtgaagattataaggatgcccgaatcctgctcagcgactgcggtgttatccacagataagatgcaatgtactttaaaggcacatattgcaacagttccggagtctccttgataagagtcaggtaacgttccttcgctcgtggactgccggagttgatgagccagttttcttgcagaagaagctggtgatccatcagccgcagtcccagattggctagtccgatggaagaatgatataattgattcaaggttgcgcgggatatactgtaggctacactgtcgcacattgcttcaatattaatcagtgaataagcattgtctgcatatccccagacggagaaagctgcttctccgtctgaagcgaaccagatggtggcatctgctccgtctttgtggtaatatgcccgccatattcccgtttttataaaataaaggttgctgttctttgtcccttcacgtacaatgaggtctctctttttgaaatgtacttcctccatacagcctagtaaggtctgtacgtcactttccaatactttatatttgtcgcagagttttttaatgaatgcatccatgttgcaaatatactcatagtcggtggaccatgaagcgatctttgaaataaattccgataatatagagagtcgttaacaattctgccaacgaaaccgccagccatattcccggtactcctaaaacaagtggaagtacaaagaatccgatcagcatgaataccactccccgcagaagagtgatgatggtggctcgttgacctcgtctgatgctctggtaatagccgatgcctatcatattggcggcaaaaaatatgaatccaaccccaaaataaggaatgccattgaccgcaatatcaaaggccggacagcttcggtcaatgaacaacgaaacaatattctgacggcatagaaacgtgatgatgaaaaagctgattccgcaaattaaagctgtacggatggcaagatgtagggcttttcgaacccgatccggttgcccggcaccgaaattatagctgataatcggctgtgcggattgtgcgatggcattgtataccataaagatgatggggaagaagtagcaggcaatgctgaacgcagctactccgtcttctccgagatgatggataaagacataattccctaaaaacatcatacaggcgatggaagcctcactgatgaaagcggaagttcccagttttatcatatagccaccgttacggagcgttagcatcaggcttttcaaacttagcttgatgcgatgcaaatgaatgttgcgggagaaccgcgtaagatagattacagtcatcaatccacctactactgttcccaggctggtggcaaaggcagcacccatcattccccagccaaattcaaagatgaaaatatagtcgaatataatattgaatatagctgcgatggcattgcacatcatggcataattgggagatccgtccagccggatgaaaaacatgcctgtgctcaataactcatagaatacgaggaagggtagataccagatcatatattctatgacaagaggcaataatctgtctgaacttccgagtaagcatcccaatggccctacgaagcaaaaacataaagcagacatcactaatacgatgaacgtagagaatacaagagcctgagtaatgttgatatttgctgccttgcgtttaccttgagacagatagatggaagcgactactgagcctccgactccgaacattagtccgatgcctgttgcgatcataaaaagtggagctgttatattgacggcagctagggcgtcactgcctattcccttacctacgaatatgccgtctgtaataacgaatatagctgagaataccattcccagtaccgtaggaactaataacttacgaaacaatgtggagatgtccatactaccgaaatcaatactatctttcataacttcttatttttagtttgttgaaaacatctgcaaaggtagatggatgtaaggagattaaaattatcatttgataatttccgcctgtcatgcttgtttttgtttaatcaggatatgggatatttatctgattcttattttcatggcttgtgcgtcaaatgtgattgactcgttatggaacagtctttctatatgtccgctcgttatcatctcattggtaggcaggctgtagagttgaggattatcaatcagcatgattgtgtcgcaaagtgagagagcgatgtccaggtcgtgtgtggaaaacaggatacactttccttccttttgcgtcagcttccggagaagcagacagagttcgtagcggttgggcaagtcaaggaaggcggtaggttcgtcgagcaggatgacaggagtgtcctgtgcaagggcacgggctatcatgatgcgttggcattctccgtcggacattttgtccatcgtcttttccgcataactgtccatgcctaccaggtgcatggcgttgtccaccttctccttgtcttctccttgcagctgaccgagccagttggtatagggagcacgtcccagtgcgacgacgtctctgcatcgcaggttggcaatgcgcactttgtcggtggtgacgaagctgatgttccgtgccagttcttccggtttcagtgaagcgatgttattcccgtgcaggataatctctccgttttggggcttttccagtcccatgacggcacgcagcagtgtactttttcctgtgccgtttctgccgagcagtgcgacgagttgtcctcccgtgatgtgggcggagactttttccagcagcgtacgctgttcgtatcccagtgtcaggtctttgagttgaatcatttgaatatacgcaagtttttacctattacccataaaataaccggaactcccagcagtgcggtgatacaattcaccggcagcaggaatttcttggcgatgatgtcgcatatcagcatggcgataagtcctgtcagcatggtgcccggcatcagtatccggtggtcggcgttatcaaacagcagccgggtgatgtgcggcactgccagtccgatgaatcctacggggccgcaaaaggcggtgactgttcctgtcagcagtgctgtagagatgaagacaagcgtccgcgagcgtttgatgctcatgcccatcgtgcgtgcgtagttttcgccaagcaagagcaggttcagtgacttgatgcaggctacggagagcagcagacctatgcacactactggtatcatgatagacagctgtccggctgtgatgtggctgagcgatcccatcgaccacagggtgaacattttcagttgttccgccgaacttagatactgcaatatctggatgatggctcccgctacgtagcctatcatgactcccatgatcagtacgcccagtatattctttactttccggctgatgatggctacgcccagcaagatgacggcggtccctatccagcccgaacctacgatgccggcggattgcaaaagtgggaaatccgcccagccgagcaatggggcacctaatataaacaacgccactccgagtcccgcaccggaactgactcccagcagataagggtctgccagcgggttctggaaaacggtctgcatttgcaggccgctgaccgacaaggcgatacctatcaaccctgctactactacccggataaagcggatggagagaaggatgttgcgtgtcatctcgtcgcattcgcctcccgtcagtacggcccatactttggggatggggatataagtgtcccctgtcgccatgtctattaataataagactacggcgattattcccaaagtgatgaataaaagagtggtgtgtctacgaggttgcttcattccaggtgtctgtaatagtaggttgagtcggatacaagttcgggatgaaagatatgaatcagatcacgcaatacgacgtcaggccgtacgactgccgattcccaatagtcattgcctcctgtggcggttatccgcaggttgttgttataaactgttttattacggacagatttggcatcggcaaacttgggattcatgtttttcagttcgtccagtgtggatgccgtgcctacattgatccaatagtctgctttttgtatcagtccgtaggcagtttccaggccgatgggggcggagctgttggaggtgttctccttgtatatatagtcggctcctgcgtcagtgaccagttgtgccatgtagctttgggtggaaggcatcacccagctgtcgttccacggggtgttgaacatcacggtagggcgttgctctacggatgcggtgaggtctttcagtgcctgatagcgtttggggatttccctgaatacatcgatgcctttgtcacggctgtctgtcagttcggagagggcaaccagccattcggctttgccaagcggtgactcttccagatattctcctacatacatataggggatagcgagttctttcagcttgtctgttactgctgtctgggcatcaccgatgccatatagcagtacgacgtccggtttcaatcccagcaatagttcgtagtttatttcggggcccatgtccttgatagaatctttgtgggcgaggatgtagggattggctatgtagttaatgccggatacggctacgatgcggtccacttgtcccagtgcgtcgagcatggcgatgtaggaggaagacatacatacgatgtgttgggctccggcagggatggtcggtccggtgaatcctgtgggggggagctcaccattgcgggagatgaagtaggacattgttacatttttggctccttgccacgggttggatacttgtatcaaggtgctttgggcattctttgcgcccagtatcttgaatccggtagcatattcgggcgtgtatacgtcttgcttgaatgcttccaaagaagtttttttattgtatacgcagcttgccaaaaaaaggaggcataatagcgtgatagttgaaataatggatttaaatttcatacggatgtttttatctgaggacaaaagtagtaaaaaagaagaaaaatcacctcccttacgagaaagtttcgctgggaggtgaatggattgaatctaacttttcaatattgatgcggaaagttatttgacgaagactacggcgttcacgttggctgtgccggtatttaccatatctaggtaatcacctcctgcggagtcataaatatacaatgcgtctcccattgattgaccgaagcatacatctccgttgaatggattgactgttacgctgaaaccgaacatatatccgggatcatcagtgaaatcgctagtatcatcattagataattgtactttttgcatgatagtcttatagtcagttgtgttccaatcaatatctgctgtataaagatattgactgccgattgcaaatccacctgctttttctgtaactaatattggagctacattgggtgtagttggattgaatttgtacaatgcagaatgcatacctccgtcacccagtacgttaaagtacatcttattggctgaataagctgctatcaacttaggatttttaggaacggtaatttgagtttcatcgtcaagggtaagtggcaatacggaaatagttgttccttcaccagcttgggtgtcatcagtattgcctgaattgcagacatacactttgttgtctttgccgatgcagataccttctgaataggtcgcatccagttctaggtagttaactttagcataattcatggtgtcgatagacatcactgcccctgaataaaagctgatatatacttttccattggcagcagccaagtgtcttggcatagctttgtgcccggttttttcatcatcgtattgtttcatttgaggtgtgagaagttgaccggtcttggcattcagtacccatattcctccattatctgctgtaaggtcgtgaccacttactgcacaatagagttttgatccgtattgaatcaagtcgttgcctgtgtctccaatttctagggtagactttttcgtccaattgttatcatagcgaacaatgtttcctggagatgagggaggagctacatgccatgtaccttcgctaagtacatacgcatacgtccagtcattactcgctgtagcacgtgtctgcggaagtgaactgtctacttgctggacattgtccaacacatcattagtacaactgcccattgcaaacataattgcactggctgctaagaaaaaaatgctctttttcataattgtaatttattaagtgattaattatccggtgtaaaatcaccggttgctgattcttgcatctgttgtaatgttactgttccgggaccacaagtacgtacgtaccattgggcgtcttctgtcattgcatctgctatatctttgaatagactaaaatcgtatagagctgtgaatagtctaatacttatacgatttgacgattttaatttgggcaaaaggtcttcaagtgatgttatgttggtatttctgctgccatacatttctaaaaactctacagactctaaactcttaaaatttaaataagagaggtcagttacagttttttctatatttatatataacctttcagtcactcttgtaagtttaggaaagttgcatcttttattgtcatttccagtagcgaatttacctacagtttctaaatcgggcatactcactgactccaatgtcacatttgctgtagcttggaaacttaattcccctgtaacttgtttaataccggaaagttctacattagtaagcggagtggtaaccgtgagactggcaaaagtagagattccttctgttttgggtagttgatatcctgtgaatgcatagcttcccatttcttcttttccttttagaacgaaattattgtcaacataagtgatagaaatactgttgatgtctttttgacttgcatccaattccgttacgcttggacaatgtgatacacttagcttttccaaattggacggtgcaatggtttcgttcaacttcgaaaatttggcacaagaagtaatgctaaaagaagaaagagtggataatttgggaagactgattgtttctaacttatctgcataaccaatagatacttctttacaggagataagttccggtagattaatttgggtgagttccggatgttttgttcccaacgatagagtgaacttttttcctacctgctttaagaccggcaaatctaatgaaacaagctggctgccataaagagagaatgtaccatctccatcactgttatctccttttcccggaatgctttcgagcgaattgagatttaagcttttcaggttgggagcttggatatagcattgttttagaattgtagttagttgcgggcattttatagaagtgatgttgttttctgccgggtttgctatgaatagttctccacggatagaaagcaagtttgggagtgcaaactcggtcagtgagctattgtttctcatgctgatacttcccaccttttccagtttagccagtccggcaaggttttcacctttatagtattgcccgatagtgatgtcgtccattacttcggtaatctttgccaatccgttcagattaatcacggggtcttctgtattttctactgtagctatgctcagactgccttcgataaccgtgacatggtggtcggctaaagcgtctacatcagcttgcgaattaagtatgaatgtgccgatttcacttacagcggagtagcgtactgtatatttataggtacgcgtagttccgttgtaggaagttactgtgaattgttgctcttcgccccaggcggtaacggaagaaggattggggttaacagttgcctgctcgctaagggtatagctggcttgcgcgccatcgagcgaagttccttcgggaaccgttacggtgatctcattgtctataatcgtcgctttccatacgttttcattgctttccagtgaaaaactaaggaagttgttgtctactccggtgaacgggttttcatcgtcgtcgtcgccacatgctgcaaagatgcatccggtacataaaaccactaacagggttttccagtaatttacttttctcattgtctaaaaaattaagtgaatttataatgaatgattattaatctatctttgaaggagcttcgctcatcttataatcgacgaagccgaatacttcggtggacaactctccgatggctcccgctacggattgtatgccggtctgcaccttgatgaagtcgatgtattgcaacttgaccggagtgccgtcgggatacatggcgttttctatcttgaaggcgttgcctacgggtgcggcatcgtgattgtcgccctcggcgagaatgtcttctccccagttgtccgcatatccccacggataggattcattgcgccagattccgcccggtgtccgggttgtatttcgcttcaggcgggtaccgtataaagtatagttgttttcctttatccatagcgggaagttaggattgaggtcgatggagccggagtttccccggttgtcgatccattgcaggggcatattgtgtgtaggcgggcggtagtaagtgacggcatagtgttgataggtttccgcctttccggtttcgctgccacgtagttcgtaccaagtgtcattgggcagtccgtctccgttttcgtcctgcatgacgtagacgatacccggttcggaactaccgtcgaagggattgcctatgatagcgaagtcatatcctccgttgctgctaacatcgggtttgttgtatacgctgtggtcgaatcccacgatgatatatcctccccatgcacccagagacacataattgttttgtacattcatgcgagtctcagcgtaacgacaggcttcttcttcggtctgtccggaaatctgtgctatgaattgtcccggagcagggcgtaggtggtatactttcactttactgtccgaactaccagctgacggtgcgcggtagtatttggcttcatcagacggcaggcagactacggtctggatagcactttttattatgtcgccatctgttccggttacttttaccacatagcttccggctgttggtggagtgaaggtaaaagtggggccagtttctccctgttgcattacttcgtctacttcccacacgtaggttgcatgggttgttgtatccgtaatgacgggagctatacaggcagcacgacctttggggacggttagttgattactgctgaaggttatattcatcactggctcaggtgataccagtacggaagtcgacgcattcccgctaccgtcttcgttggtaaccgtaagtttgaaactgaattgtccttcttcggtgggggtaaacgtataggtagcttcggttccgaccgtttctttggttttaccgctttcgtcaatggacacccattcgtactttgctccttcagtgaaatttacggaagattcgagggttacgctctttcccatataggtagagtaggcgggaatcaatgatacggaaggtatcattttttccactacatctacccgcagttcttcttcggcataaccattcttggcgtccacgcggaatttgaaatagacttctccttccgctttaggtgaataggtgtatgagaggtctgtacatactattttacctttctcgtctttccatgtatatacaggatcggtggcatcgttcactaggggagtgattgtgatgcttttcataatctttactgtgtagattcccgtaccgttgtcgaaggtaattaccggtggttgacctgttgtcccgccacccaattcttcatcatcaccgtcgttccggcaggaggcgaaagacacgacagtacatagcattaataagctagcgattgtttttaaaaatccatttatcataagcatacttttaattagtttgcaaacaggaatgataatggattttacgctgggcagtcagtatcccggtaagtataaatatagaagaagcctcttccgtccgcacatggtaagcgcctgtggaaaaagacaacgaactacctcccgtatgccgcaggagtaaaatccaaccgaaaggaggtaggtcttctgacttattcccttatttgcagcgccttcccagagaaaatttccagtgacaaattgctacaaactgtactgtccttcaagggcagtacgggaaaatacagcagcggatactgttgccgattcacacggcattcccttttaatcttcgatagcttttgttatatcttaatcgaatgaaatacaacttattatagcaacgaagaaccaacttcttgaccgcaaagatagttatctttttatataatatgtctattttaactaattaatttttattacgttgtcgggggtgggaaaggaggaattggatatggtgacactatctctctctgatagtgtcaccatacttgcaggatagtgtcactatgccgatggtatagtgacaccatctccaaatgttctgtttttaagattttctattgggaaaatagaagctaaatacttgaaataggagaaaaatggattacttatatgcaagaatatgcggaaagcggaggccgttatgcaggaaaaatggttatatatgcagcttttgccgaccaagtaggttgattttcttttaaaggaaggcgggtttggttttaaaggaaggtcagtttggtttaaaaccaatcttagtttgcttataaagcaatgttaattcggttaagaagcaatcttatttcgtacgttattatgcttttttgtgctgtttgctcttttgatatggatgcttagtttatgataaaatgtcgtagatatagtttcttttgtttgctgttgcttgcatattcttgtaatctaggctaaaatgattgaaaattgatggttttgatattaagccgcttttgtgaaaatagaaattcctcctctttttgatgagtcatccggtttttatccgaaagataggaaggaacagagggcaaacttttctctttttcatctgcttgctcataatgtgctaatttgaagaagtctttaatcttttgttcttgataaaaaagacaggggagaagtgaggcgtgaaatataattatagtatctttgcacccgcaaggttcgtatttggaattgtctaaccttccaaaacgatgaaaagggaatccggtgtaaatccgggacagtacctgctgctgtaagtcctctctttcgggagatgagtttatcacattctttgccactggtgacatcactgggaaggcgtgataaacggggacgagtcagaagacctgccttgccgctgcagatttatacccgcgggtttcgggtagaaatcaactggtatagttcattcctatattcaattgattcctcattcaaccggtcggtacaaatgctatgtttgatgtttgtcgcaaattataatttgctggcagatgtctaatgagtgatgcgacaagttagttaataaccttttctcacttttaattatgaaacgaattttactatctgttttatttattgtcttctgtctgacggcttttatcggttgtatgaaatgggattatggtgagatggaggatttctcagctacgggagacggtcttttcattaccaatgaagggaactttcagtatggtaatgctaccttatcttattatgacccggaaacgaaaacggtagaaaatgaagtattctatcgggctaatgcgatgaagttgggagatgtagcacagtcaatgactattcgtaatgatgtcggttgggtggtagtaaacaactctcacgtcatttttgccattgatattaatacatttaaggaagtgggacgcattacgggacttacttctccacgctacattcattttatttcggacgaaaaagcctatgtcacacagatttgggattatcgtattttcattgtcaatcccaaaacttatcagataaccggatatatcgaatgtccggatatgacgatggaaacaggctcaacagaacagatggtacaatatggcaaatatgtgtatgtaaattgctggtcttatcagaatcgtatattaaagatagatactacaacggacaaggtggtagatcagcttactgtaggtatacaacctacttctctcgttatggataagaacttcaagatgtggacgattactgatggagggtataaaggaagtccatacgggtatgaggagccatcgctttattgcattgatgccgaaacattcaagatagagaaacaatttaagtttcagttgggagatgctccttcggaagtacagcttaatggtgcgggtgatgaactttactggattaacaaagatatttggcgtatgtctgttgatgcggagcgtgtccccgtacgtcctttcctcaagtatcgtgatacgaagtattatggtctgacggttagtccgaagaatggagatgtctatgtggctgatgctattgactatcagcaacaggggatgatttatcgctatacgaaagatggggaacttgtggatgagttttatgtagggattattcccggagcattttgttggaagtaatcggtagagaagaatatgaggagaaatatattattagtgcagtttgtaggagttcttttattacttccatctataatgagtggacaacaacacagcagcgacaataagaattgggcggaaaagggagttgtcattcgtgaagtggaaattttaggaaagcgcccgatgaaagatataggcgtacagcagaccagatttgattcacttgtgcttaaggagaatatagccttgtcaatggcggatatactcactttcaattcttctatttttgtaaaaagctacggacgtgccacgctttctactgtatcatttcggggaacgtctgcttcgcatacacaggtaacatggaacggtatgcgtatcaacaatccaatgttggggatgactgacttttcgatgattccatcttattttatagatgacgcttctttgctgcatggcacttcatcggtgaatatggctggtggtggtttgggaggattggtgaaattatctacagtgcctgctcatcaagaaggcttcggaatgcaatatgttcaaggtatcggttcatttagtaccttcgatgagtttctgcaattgaagtatggagataaacattggcagatctcgacgcgggcggtctatcagtcgtcgcccaatgattataaatatcgtaatcatgataagaaagagaatatttatgatgataaatataatataatcgaacagtattatcccatagaacgtaatcgtagtggtgcatacaaagatctgcacattttacaggaggtatattacaatacgggtaaaggtgatcgcttcggactgaatgcgtggtatactgattctaaccgtgaactggcattactgacgaccgatcagggtgatcttatggatttcgagaaccgacaacgggaacatacactgcgaagtgttttatcatgggatcatacgcgtgaaaactggaaagtatcggcaaggggaggttatgtgcatacatggttggcgtacgactataagcgggatttgggaaatggtataatggctacaatgacccgttcacgtagtaaagtcaatactttctacgggcagttggatggagagtattttttctcagataaactccttttgacggcgggtgtgtcggctcatcagcatttggtgaatagtttggataaagatctgaataaagatgataataagaacgataagtatggtcagggaaggaagaatgattctattgtttattttgataaaggacgtattgagttgtcgggtaatgtctcattgaaatggcagccggtcaatcggttgggtatgtcattggtcctgcggggagagatgttcgggactaaatgggcaccggttattcctgccttttttgtagattatgttctttctaaaagaggcaatataatggcaaaggcttctattacccgtaattatcgttttccgacattgaatgacctttattttttgccgggtggcaatccggcattgaataatgaaagtggatttacttacgaaacggggctgtccttttctgtggataaggataatgtttatacattatccggttcggcttcctggttcgatcaacatataaacgactggattatttggctacctacgtcgaagggattttattcccccgttaatcttaaaaaagtacacgcctatggcgtggaagtacaggctgattatgcagttgcaattgataaagcatggaagcttggattaaatggaacatttgcgtggactccttctattaatgaaggtgaacctacgagcaaggctgaccagtcagtagggaagcagttaccatacatacccgaatattcagctacgttatcaggcaggctgacatatcgcagttgggggcttctttataaatggtgttactatagcgaacgttatacaatgacgagtaatgctgtatcctatacgggacacctcccaccctatctcatgagcaacgtgacccttgaaaaaggattctcactccgttgggcagatttatccttaaaagggacagtcaataatctctttgacgaagagtatctttcggtattatcccgtccgatgccgggaattagcttcgagttctttatcggtataactcccaagtggggcaagaagaaaaaataggtgggtgatagccggactcctgtgccatgtagatgtattattggcagagtatatatgaaaaaaggatgctttccgattgcttcttttaaatataacttttgtataatggtgcatcttttagaaaaaagtcgtatgtttgctatcaaaccataaaacaaaatgtactatgagcggtaattatgttatcaatatcggtcgccagttaggtagcggcggaaaagaaataggagagaagttggctgcccgtttgggaatcgacttttatgataaggaactgatcaatctggcttccgaagagagcggcttatgtaaggagttcttcgaaaaagctgatgaaaaagcctcgcaaggcattatcggcggactgttcggtatgcgttttcctttcatcagtgaaggggcaatgccatgtaccaactgtctgagcaatgatgctttatttaaggtgcagagtgatgttatccgtcgtctggcggcagagaaatcctgtgtgttcgtcggacgttgtgccgactatattttacgggaacatccccgttgtgcaaatgtctttatctcggctactaaagaagatcgtatcgcacggttatgtcagatgcatcgtattgatgaggaggcggcagaagagatgatagaaaaagcggataagagacgttcggagtattataattactacagttataagacatggggagcagcggctacttatcatttgtgtgttgattcctcttctttgggaattgaagagacggtgcggtttgtggaagagtttgtggctaaaaaactacagattggaatgtaattgaagaagaaaacaaaatcccgataataataaagccggctaaattctttctgaatttggtcggctttatttattaattaaattagttcgctttacatcatcgccagtaatatcatctgtcccgtcaagatacgaaggaacatagataatggataaacagtagaatatcctactgccggtgcatcactggatgtcacctgattggcataagccaatgcgggagggtccgtattactaccggctatcaatcccatcagagtgaagtagtttaccttataatatagtcttgcaattgcaccgatgataagcaacgggatgacagtgatcaggaaaccacagcctacatacagtaagccgtcgccttctacaactgtttgtacgaagttggcacccgcatctatacctacactggcaaggaatagcacaataccgatttcgcgcagcatcaggttggcactcattgtggtgtaagtcaccaaatgaagtttgtgtccgaaacgtccgatcaggatagctaccaccagcggaccgccggccaaacctaatttcagaggagtcggcataccggggaatgcaatcgggagacttcctaaaagaatacctaagaagatacctacgaagatagtaacgatattcggtgtgtccagacgtttcagttggttacccaaaacaccagctacacgctctaccgcatcttgctgacctactaccattacgcggtcacctacctgcaatatcaggttcggatcagcgaacaggtccataccggaacggttgacacgggtcacgttgacaccatacatactacggaagtgcatggaaccgagcgtttttccgttaatttccggtttagtaaccagaatacggcgggaaaccatcggaagatcctgcttctcccagtccagttcgacttcttttccgataaatacggtgatggcgggagcatcttcttccgaacagacaataaacaattggtcgcccatattgaatatcgtttcgtggttcggaatacttacgtgtccttcgtgacgaatacgggagcaaacaaagttgcgtcccagaaattctttgatttcaatcagtgtttttccgctgatagactcattgcgtacctcaaggctcatcatgtgcggcttgtggtgcgcgtctccgctctgagttttcaggctctcttcctctttggtcatattgacgcggaagatgtaacggatagcgatgatagaaccgatgatacctaccacacccagcggatacgcacaggcataacccagtgcaatctgcggtccgttgtagctcaactggttcagggcctcattggcggcaccaagtcccggagtgttcgtcacagctccgtagaggatacctaccatcatcggcagttccacacgaccgttccagaggtaataaagccccaatgcaacagcaatatttaacactacgatgcctacagccaacaggttcaatgtcattcccccctttttgaaagaagagaagaacgatggccccacctgaagaccgatacagaatacgaacaagatcaatccgaattctcggatgaaatgtaggatgtgtgtatcggctgtgaagccgaaatgtcccattaggatgccggcaaacaaaacaaaagtgactcccaaagatactccgaatatctttattttaccgagatacacaccggctgccactacaaaagcgtagaggaatacaatgtgcgctacggagctagggtcccacaataaactttgtaaccaatccataaatattagtagtttttataatgttcttttaaaaacgggtgcaaaattactcattacatcggagctaatcaaataaaaggagaactaaaaatgaagaatgaggaatttgcttcgtttagctttaagttgcatggagattcttcattctatagtttatcattcttcattttctctctgtaacctgtagtgcgaattttttctaaaaagaggaatcgttcgaacttattaattatatttgcaagtcgaacgactgacatttagaaagagacaaataaaaataaagacaatattaattcttgttttaattttaaataaactatggcagacaaaaaagaaaaactcttctcagacttttctcctgtctccaccgaacaatggatggagaaggttacagccgacttgaaaggtgctgattttgagaagaagctcgtttggaagacaaacgaagggttcaaagtgaaacctttctaccggatggaagatctggagggtttgaaaacaacagatgcacttcccggagaatttccctatctgagaggcaccaagaagagcaataatgagtggctggttcgccaggaaatcagagttgaatgtccgaaggaagccaatgccaaagcactggatattctgaacaaaggtgtagattcactttctttccacgtaaaagcgaaagaactcaatgcggaatacattgaaacactgttgaatgatattcaggctgagtgtgtagaactgaacttctctacttgtcagggacatgtggttgaattggctggtctgctggtggcttatttccagaagaaggattatgacgtgaagaaactgagaggttctgtcaattatgacttctttaacaagatgctgactcgcggtaaagaaaaaggcgatatggttcaaactgccaaagccctgatcgaagctatccaaccgcttcctttctatcgtgtactgaatgtaaatgcaatctcgctgaacaatgccggagcttacatttctcaggaattgggctatgcattggcatggggtaatgaatacatgaaccagctgacagacgcaggtatccctgctgctacagttgccaagaaaattaagttcaacttcggtatcagttccaactacttccttgaaatcgctaaattccgtgcagcacgtatgctgtgggcaaacatcgtagcttcctaccatcctgaatgcctgcgtgattgcgacaataagggggctaatggagaatgtcgttgtgctgcgaagatggcggttcatgccgaaacttccactttcaatcttactttgtttgatgctcatgtgaacttgcttcgtacacagactgaagcgatgagtgctgcattggccggtgtggattcaatgacagtcgttccgttcgataagacttattcgactccggatgaattctctgaacgccttgcacgtaaccagcagttgttactgaaagaagaatctcattttgataaggtgattgacccggctgccggttcttattatatcgagaatctgacagtgtctatcgctaaacaggcgtgggaactcttccttgccgtagaagaggcaggcggtttctatgctgcattgaaagccggtacagttcaggcagcagtgaacgaaagcaacaaggcccgtcataaagcagttgctcaacgtcgtgaagtgctgctgggtaccaaccagttcccgaacttcaatgaaaaagcaggtgagaaacagccgatagaagcaaaatgctgctgcggaggtgatgctcatacttgcgagaaagatgtggatactttggtattcgaccgtgcagccagcgaatttgaggcattacgccttgaaacggaggcttccggcaaacgtccgaaagcgttcatgctgactatcggtaatctggctatgcgtcaggcacgtgcgcaatactcttgcaacttcctcgcttgtgccggatatgaagttattgacaatctcggattcgaaacggtggaagccggagtagaagctgctatggctgctaaagctgacattgtagtcctctgttcaagcgatgacgaatatgcggaatatgcggttccggcataccatgcattgaacggccgtgctatgtttatcgtagcaggtgctcccgcttgtatggatgaactgaaggcagcaggtatcgagaacttcatccacgtgcgtgtcaacgtattggataccttgaaagagtttaacgccaaactattgaagtaagatgagaaaagattttaaaaacttagatatatatgctgcatttcagcccgctaacggtgctgaatggcaaaaggctaacggtatttccgctgactggaatacaccggaacacattgatgtgaagcctgtttatacaaaagaggacctcgaaggaatggaacacctcggctatgctgccggacttcctccttatctgcgtggtccgtattcagtgatgtacactcttcgcccctggaccatccgtcagtacgccggattctctactgccgaagaatcaaatgctttctatcgccgtaacctggcttccggtcagaaaggtttgtccgtagcatttgacttggctactcaccgtggttatgaccccgatcacgaacgtgtggtaggtgacgtaggtaaggcaggtgtatctatctgctcactcgaaaacatgaaagttttgttcgacggtattcctttgagcaagatgtccgtgtctatgacgatgaacggtgcagtacttccgattatggcattctatatcaatgcaggtctggaacagggtgctaaactcgaagaaatggccggtactatccagaatgatattctgaaagagttcatggtgcgtaatacttatatctatccgcctgcattctctatgaagattatttccgatatcttcgaatatacttcgcagaagatgccaaagttcaattctatctctatctccggttaccacatgcaggaagcaggtgcgacggcagatatcgagctggcttatacattggccgacggtctggaatatctgcgtgccggaacagcggcaggtatcgatatcgatgcgttcgctccccgtttgtctttcttctgggcgattggtaccaatcacttcatggaaatcgcgaagatgcgtgctgcccgtatgttgtgggctaagattgtaaaacaattcaatccgaagaatccgaaatcactggcattgcgtacacactctcagacttccggctggtcgctgacagaacaagatccgttcaataacgtaggacgtacttgtatcgaagctatggctgccgctttgggacatacacagtctttgcataccaatgcgctggatgaggctattgcccttccgacagacttctccgcacgtattgcccgtaatactcagatttatattcaggaagaaacctatatctgtaagaacgttgacccatggggcggttcttattacgtagaagctctgaccaacgaactggctcacaaggcttgggaacgtatcgaggaagtagaaaaactgggtggtatggcgaaagctatcgagacaggtattcctaagatgcgtatcgaagaagctgctgcacgtacgcaggcccgtatcgacagcggttctcagactattgtcggtgtgaacaaatatcgtctggaaaaagaagctccgattgatatccttgagattgataacacggcagttcgtcttgaacagatcgagaacctgaaacgtttgaaagaaggacgtaaccaggcagaagtggacaaagcactggcagccatcaccgaatgcgtagagaccggtaagggcaacttgctggaactggctgtagaagctgctcgtgttcgtgcaacgctgggtgaaatctcctatgcttgcgaaaagattgtaggacgttataaagcaataattagaacaatatcaggcgtgtattcatcagaaagtaaaaacgatggcgacttcaagcgtgcatgtgaactggctgagaagtttgctaagaaagagggacgtcaacctcgtattatggttgcgaagatgggacaggacggtcacgaccgtggtgccaaagtggtagcaaccggttatgcagactgtggcttcgatgtagacatgggaccattgttccagactccggcggaagctgcccgcgaagctgtagaaaacgacgttcacgtagtaggtgtttcttcattggctgccggacacaagacattgattccgcagattatggaagaactgaaaaagctgggtcgtgaagatatcgtggtaattgccggcggtgttatccctgcacaggattatgacttcctgtataaggcaggtgtagctgctattttcggtcccggtactccggtagcgaaggctgcttgccagattctggaaatcctgatggatgaagaataaacacggaatttaatcattttttctattttttttatcccgccttatagctccattcgggctgaaggcgggatgtttttttcatctttatgcggtcagtgagaaataatcatgtaactttgtagactgttagtataaaaacaagaagagaaaaaatgatagtttgcatagccgaaaagccgtctgtagcacgtgatatagccgaagtactcggcgctcatacaagaaaagaagggtatatagaaggaaacggataccaggtaacctggacattcggtcatctttgtaccttgaaagagccgcatgaatacactcctaactggaaatcatggaacttgggtagtttaccgatgattccgccacgtttcggcatcaagctgatagagaaccctacttacgaaaaacagtttcacatcattgagggattgatgcagaacgcggatgaaatcatcaactgcggtgatgccggccaggaaggagaattgatccagcgttgggtgatgcagaaggcaggtgcccgctgtccggtgaaacgtctttggatttcttcgctgacagaagaagcgatccgcgaaggatttgcgaagttgaaagaccagtcggattttcaatcactgtatgaagcgggactttcccgtgcaatgggggactggctgctggggatgaatgccacccgtctttataccatcaaatacggtcagaacaaacaagtgctttccatcggtcgtgtgcagactcctacgctggcattgattgtcaaccgccaattggagatcgccaacttccagccgaaacaatactgggaactgaaaacgaattatcgtgatactaccttttctgctctgatccgtaaaagcgatgaagaaattgctgcggaagaagaaaagagtggcggaaagaagaagatagacaatcccggcatcgaccctatcgccaaccgggaggagggagaagcgctggtggaacgcataaaggaccttccgttcattgtcaccaatgtcggcaagaaggatggaaaggaatatgctccgcgtctgttcgacctgacttctcttcaggtagagtgtaataagaagtttgcctattctgccgatgaaacgctgaagctgattcagtcgctttatgaaaagaaagtggctacttatccgcgtgtcgatactactttcctgagtgacgatatttatccgaagtgtcccggaatattgaaaggtcttcgggactacgaggtgctgactgctcctttggcgggtgcttcattgcctaaatcgaaaaaggtatttgataattcgaaggtaacagatcaccatgccattatccctacaggcgtttatgcgcagaatctgacggatatggaacgtcgtgtctatgacctgatagcccgtcgttttatagcggtgttctatcccgattgtaagatttctaccactaccgtgatgggcgaagtggacaagatagaatttaaagtaaccggcaaacagattctggagccgggatggcgcgtcgtttttgccaaagatgtgaaagatacttccgaagaaaaagaggaagaggatgaaaatgtacttcctgcctttgtcaagggggagagtggtcctcatgttccggacttgaatgagaagtggacgcaaccgcccagaccttatacggaagcaacattgcttcgtgcgatggaaacagccggaaagttggtggataatgacgaactccgtgatgctctgaaggagaatggtatcggtcggccgtctacccgtgccgccattatcgagacgttgttcaagcgaaactatatccgcaaggaaagaaagaacctgatagccacccctacgggagtggaactggtacagatcatccacgaagaactgctgaaatctgcggaactgaccggtatatgggaaaagaaactacgtgagattgaaaagaagacatacgatgcccgtcaattccttgaagaactgaagcaaatggtatctgaaatcgtgatgagcgtactttcagataatacgaaccgacgtatcactattcaggaggcagttgcccaaacggaagaaaaggcaaagaaagaacctaagaagcgtgagcgtaaagcaagtgctcccaaagaaaagaaggcgaaagcagaaccgaaagttcctgcatcttctccgtctcctgctctgactccttctgctcctgcctctgctccggctaccggtaatgcagatacttttgtcggacaaccgtgtccggtttgtggtaagggaaccatcattaaagggaagacagcttacggatgttcggaatggagaaatggatgtacttaccgaaagaatttcgaatagtttgtggacagtgtctcacataacagtgatttctcttttttcaaagaaaaagagtcccttcttttctgttcgcaccataaggaattagatagccgttttgctatcacgctctcactatccacttgtatccctttattcatcgatgtttcagggatggtagcaagcgtggtggcaagtatgagagcaaacggttgctctcactctgtctcgtcctgattagtatcgtttttgtaatgttatcttttgatttacaggatgttaatgtctgatgtgtcagttattaacgtttgatttctcaaccattaataactgagaaatcaggtattaaagactgagaaatcatgtattattgaccaataattgattttatgcttcctaagagaacagctcaatcggaataactgatatggttaatgtgattgaaacgtgcagtcaagtcaatcaaatcaacagtacattcagatagtttcagacgcttgaaacttttggtttcaacctttgaaaccaatggtttcaaggcatgaaactattagttccatgtagtgaaacacaatatttcaataagatgcgcaaagataacgtaaccatgttaaaaatcaaatagttataaaacatctttttttaacgaggccggaaaaggaagcaagaaaaagcatattggggcgggagttacgttaccaaatcgtaactcagtccaaacgcctcaaattgaatcctaatagactatattacagttgtttgcacacttctgcataaccttgaatagctcaacagtaattaaatttgtgactaaaaaaagttgagttatgaaaagtacattcaaagtattattttacgtaaagaaacagtctgtaaaaaacggaaaggcaccggttatgggccgtatcaccatcaatggaacccaagccggtttcagttgtaagaaagaagtgtccctcgctttgtgggacgtcaaaaccaaccgggccaaaggcaagtccgaggaggcccgtacactcaatcaggagcttgacaatatcaaggcgcaaatcaccaggcactaccagtacatctgcgaccacgacagttttgtcacggccaagaaagtctataaccgctatgtcggtttctcagaggaatgccacacccttatgaatcttttcagggaacagctggaatcgtataaaaagaaaatcggcatagagaaagccgaaagcacctaccgcggtctggttgccgactacaagaatctcctgcttttcatgaaaagcaagaagaatacggaggatattgtcatcgaagaacttgagaaatcattcattgaggattactacaactggatgctcggtacctgtgctttggcgaactccactgccttcgggcgtgtcaataccctgaaatggctgatgtatatcgcgcaggaaaaaggctggatacgggtccatccgttcgcatcattcgagtgtatgcccgaatacaagaggcgctccttcctttcagaagaggaactgcaaaggattatccgtatagaactgagatacaaacgccagcgtgccatgcgcgacatgttcctgttcatgtgtttcaccggtctttcctacgcagacctgaaaactataacctacgataatatccataccgactccgacggcggtacatggctgatgggcaaccgtataaaaacgggagtggcgtatgtcgtaaaattgttgcccattgccatcgagctgattgaaaaataccggggtacggatgaaaagaaagactcccccgaatatgtctttccggtaggcgaatacaatgccatgcggctcagtcttggaatcataggcaggaaatgcaactgccgggtagaggtcaccccgcacatcggacgccacacgtttgccgttttggccatactcaaggggatgccgttggaaacccttcagaaagtgttggggcataagtccatcctctccacgcaggtttatgccgaactgattaacccgaaggtaggcgaggacaccgacaggatttgcgagaaaatcggtcacgtttacaaacttgccatgtaacacgacaataaaaaaagcgtccggaagccgataggccgaaggacgcttttttattacctacttgtctattttctgaaccgtctgaaatccctgtaattctttttcaacacttcgtacagtgcactctccggatagagcagtttccccccgatagtggtataaggtaccagcctttcatccctcagcgtctgcaacgtccgtcgtgagatatgcagcagggcgcacacctcatcccccgtcatgtaatgctcgtccgcaaccgtcgggcgtatccgtgccgtagcctcttccaccgctttccccgctttctttatccatccggccagttccttgaactcttccgaatcccttgtgataatctccgccatgccttacttccttttgattggtccgttttccagtatctcccgaatatccgtttcccggtagaagaatttcccccctacgttcgagtgggggattagcccgttgtcccgatagttttgcaggcaccgtttcgatatacccagagccagacatacgtcctgcgcatccattcacttgtccggtgcaggcggggcaatctttttctggaagtcgcccatctgtacggccagcgtgctgaccagctttctcaactcctgatacgcgcttgtttcaataattgtcagttccatactaaaattctttttaagtttctgaatatgcggcaaagtaaggcacatttccacatccggcaaagcccccggaatcagagtcgcccgttggcgtgcattgtctccctgaacatacaaaatgttaaaaaaacatccaaaacattgccgtaccgttccttccgcctatatttaggcaaatcaaaaaccttcaaagcccatgcgtctgaactttaccatacgtgactgtaccgacagcaaccgccccaaagtccatgactacgtagccatgctgcgccgaatccttacccaatatccccatgcggagtttgtattccagtttgcccccgacggcatcttgtccttctacggtgaatttctacccgatataaaggggattgccgctgaaatgtgctggtgcgtcatcgactgtgataccgacggttatatacagactggcactgcctgccataccatgataggggtggagatcacctgccgtcagacgcggaccggctggtgagccgacaggatagaggaaaaatttctggtaggcgatgttcccgaccatttctatccccttgtcaccgatttccgtccccccatccgtactttcggtttccacagctattacctgcacgattattcccccgtttcccgtcaggacttcgcccacacgcccgacgagtttcagcgccggggcaccaaccttgtctccagattcaaaagcggtgaagcctcagattgcgtggcctacttcatggcgatagcctttgcacgcactcccgaactcaccagccgccgtgccgacttcacccttatgataatccccgcatccaccaacgaaaggcacgagctccgcttcaggaatttcagcgttgagtttaccggcctgctgcgcatcgccaacggttacgacgccatcaccgttacccgtgaccgggaagagtacaagggacagcattacaagaacaagaccgacaatctccattttgacgaagccgccatccgtggccgccacatcctgttgttcgacgatttgctgactaccggtgccggactttcccaagtcagccgcaaactgctcgcttgcggtgccctctccgtcaccggcctctttcttgccaagaccctgcctcccgaagacgaatatgattttctgcccgtggaggaagcccctgccacagaataaaagagaagggcccgtcacccgcatccatgcggcaacgggccttccattcccttatctgttttccacataatcctacatcttcatgcctttgcttttccgtacagccgccttctccttcatgtccgctttctgccgtatttccggaaagtgctccttcaacagtttccctgccagtttcttcgccctctcctgcatctcatcatacacgtcccatctgttccggcccagctgcttgttttctatcttttcaaatttttcatggaaactgaacttatcggggtattcatccaccactccgtctctcggatagcccttgtccacgatatacagcagtgtcatccggtcataattatacgggctccgcgttagtcccagtcccttgtccgcatcagtcagcctgtaatagttctcccatgtgggggtaaggtcataggtctcactgtccgttgcgtttttcagtaccgacctgtcctgatacgcccgccttatcgtttcctcgtctccccaccagccgaaacggtcatggcaacggttcactttcccttccatcagcgagggccatcccctcagttcatggattgccagggatttcaccgcaaactccggggcaaagaagtcattctctatgtatttatacatgtaatcactatattgtatctctccgactatgtccctgctgaacagcagcacccccttgtccgtctcaacgcccgtataatacgtgttcccatgtttcaaatcatccagcatctccgccatcacttcgggtggtgcggactttatctcccgccacatctccggcgtaagccgccgggtatagttctcgtcccttgacagcgggtccatgtcctttcacaggcaatacaccacttccgacagacgcaggtatctatgcagcttgataccatgtccgtccatcgccttttccagcctttgcagataatcatcattgttcccttcccgcaaacgcggtacaatccccatatcaggcacgttatagtacatcatgcccataacgggcatttccgtttccttcagtgccttttccacatcttccagcataaactccagaaagccttcctcgcccgtacctttcatgctgacatgcaccggcttgaaatgtccgtccactgtgacatacacactgccaccgttcatattctctttttccatccgccaaaaatttaaatgttcattccttgtccttttccctttgccggaatccgcaccctcatttccacgttcgggaaccgcacgttgtccggccttgccaccagtgacgagactatccgctcctgctctccggtcagcggtacgggctgccgttgcaggtttctcagcctgttgaagttcctcagcgtaggtgccatgtcgcaacatgccacacaaatcccgtatctcaccatatccgaagaaaccgtctgtccatcaccgattttagcccggtatgcggcatccagcggagccacttcataaaacctcagacttctgggtttccgcttgccgtcaaaaaaacgttcggccagcccgctcagaaacgcatccagcatcctgtccccgccgtccgtcttgtcaaacagcaataccttccccccgtattccaccgccatgcaggtggggaaagccgccagcccgctgcgtatcacatccccgtccattccgaaacggtgtcccaggcgcctgtaatcctcgttttccagcaaggccgtatgttccgccgatgatgacagatgctcaatccccctttcctcgcagaatgccgcatcccggagcctcaccactcccgacggatgtattctttcccgttccagcaccggacagagccgttccagataatccgtattgtccgtaccgagtatgggaggaatcatgcctttgtccttaaaatcgaaacggaacattcagtggtcgggaacaaatctccgtcctaccgtatgaaacctcacgttgttgccgatgtaacgggagaatccctcttccccctgcccgcgcatactcagatacacgggtttgtagaaagcgtccagtgtcatgtacaggctgccgctttccaccgcctgcattttcctttcttccataaattctataggattaattgtttcttctctttcttctgcggagcaatgggggcgacgtgcctcgcctgccgttgtctgtcagaaggcttttgtcccggtgtttcctgcctgcggtatgtctccggtgacttgccggtcttcacctcttccaaatgcggacgcgacatcggatgtgacgtttccatcctttcagtccggcttatccgtgcgcccagcctgaactccccgtccgtaatatggaactccgattgcagcaagtccgccgccatctcccttgcctctttctgcaaggccgcatagccgaagtcgtgtgccgacagaggcgcgttcatccgtgccttcatgctgtcttccagcttctccgccagttccctgaactcatactcatagctgaaaggatgcaccttgtctgccgcaacaatcccggcgtacccattttccgaaatgtacagcaatgccgccgcgtcatagttccggggcgagatgcccagcccgaactcccttgtcagccggtcaaaattatggaaatcgggccgcaggtcgaacttctccctgcacacaccgctgtccagtacgcttctgtccgcgaacttgtcgggagcaaaactcaccaccgacctgcgcaattgtgcgtccgtactccgcaaatccgctttggacagcttttcgatgcagttgtccgccagctccgccacccgtttggtgggcagatccatctcgtatatccgcagagtttcgggtactttggccacgttgaagaagccgtcggccagatgttgcagatagctgttgcgtgccttcattcctttcggggtgtccgagaacagcatcactccctcttcggtggccactgcatacacccggtttcccgtttcggaaaattccgttgccgcagctttccgtctgtccggtttccgggcaatgcggttccaaatattattaaggattgacatagccttgtttttttagatgtgaataaccggcgcaaagaaagccgttcgcccgccaatccgcaataccgcgcacatgcaagtcgtccattggcggctgttggcgtgtggcccttacgccagccgtgcgtccagcatccggttgtagctcctgcgcagggagtcgatgaacggggtggtgtccgtacaacggtcaaagaccttgccgcgcttggtgtacagcgcattgattttcagatggaacacttcctcgaagacgcggatgacatccactattttcaattcccggccttccgtcgtacctaccgcaccggctgccatcagtgcggctaccagttcaatcagatcgctgtccgtaccgttccatgtcagtgtgacggaagttctcttcccgtttccatgtaccgtctcagccttgaatccggcggacatgccgccatgacggagcatctccttcagcatttccgcttccgcatccagcagcgccagtgtcttgccgatgaacacgtcataaagaatgtggcggcagcctgccgccattccgtcgcaggcctgccgcatgaaggtcagttctattttcgtataattcagccgccgtagttgtcccacgaggtcgccttccggtgaaagtgcggcaaggcggtccacaaagtcgtcataggcggcaggcaattcaccagccgcaggtccggcaccgtttatataagaggcaaacaaatcgaaaagggaggtttccaccaatgtcttcatcgtatcatatttttaggttttacaattcagtgctccattcatcctgccggaataggaacaaaggctatgcctgaagagagatattcataaaatacttataataagccatataaaaagtctccaaaacggtgtgtacaggaaaacattgtgtaccggacatgatgtgtccgaatttcggacatattctaatccagacggtacttcttcagtttcaggtaaagcgtgctccggctgatacccagcagtctagctgccgcctttttgtcattgcccgtcgcccccaatgccttcagaatagttgcccgttccgcccgttcgtcattaagtgaatacacttccggttgtctgtctttaccgggcaggcctatttccgtggcggttatccagccgtctttcgccagcagggtcgcccgcctgacaaccgttctcagctcccgtatgtttcccggccacggataagccttcagccgtttctgtgcctcgcgatcaaagcctttcacgttcctttccagctcccggttggcggcatccagcatgaactccgccaacggtataatgtcttcgggacactctgccagcagtggtacatgcagcggaaactcgttcagacggtggaacaggtcttccctgaaccgtccttcggctatcgccttttccagattctcattggtggcggccaccaaccggatgtccgtttgcatttcttccctgccgcctacgggtcgataacgcttttcctgcaacgcacgcaacagcgacctctgcacctcggcattcagattacccacttcgtccaaaaacagtgtcccgcggttggcggcggcaaacatgcctgtcttgtgttccgttgctccggtaaaggcacccttcacatggccgaacaactccgatgccgccagttccttcggaagcactccgcaatctaccgctatgaaaggcgcgtctgcccgtccgctcaatgcgtgtacctgccgggccacatactcctttcctgttcctgatgcaccacgtatcagtacggacaagctgtcggcaggagccaccacacgcacaatgttctgaagtttcaccgccagaggacttttgccaacgtagaaagcccgttctttaactttctttctatttctacggttcaacagtccacggatgataccgagtaccttttccgtctgaataggtttgggtagatagtctgcggcacctctcttcaccgcttccaccgcaccggggatatctccgtaacccgtcatgataaggaaaggcatacgatagccctgcgccttcatccattctaatagttccacaccgttactgtcgttcaggcgaaaatccgacaatagcaaatccaccttatggccttccaaaaagaccttcgctgaatctaccgataatacataacgggcattgataccgtttttcaccagccagtttgtggtggtacgcgcatacacgcggtcatcttccactaccaatacggtttccatatgttttttcctttattttttttgctttctctacggcctgttccacggcctcaatcagtttttctattctttcgtccgatatcccgccccatttttcaggaggcatggaggccattcccttcagttcacttcggggaatgtttatacggatcatttcccagagtggtgcggctttgtgtatgatacttcccaacttcacatagtttctcatgaagaaagcatcccgcattccggaaagttcctccgtggtgtcttctataaaaatatctagcatttcctcaacatattcctcaccttccatgatagccgtaatatccaatctgtccatttgtgaaactgccgccagcagatcctcctcagagaaaggcttatataggcagcctgcaaaaccttcggaaagatacttctccttgttgccggaatgtgccgtgacggctatgatcggaatctcctttgcctggggaatatccgagcctctcaacagttcaaggactgagaagccatcagcaccgggcatctgtatgtcggtcagcaggaagtcgtactcctgtcttttcaggcagtccgctagattccggacatccgtgcagcagtcacagtgaatccggttgcgagaaagcatctcccgggtaatctccagctggatgcggttgtcgtcaatgaccagcacgtgaatgccaacgggcagttctctgggggtaagcatcttctcttctggatgggcgcactgttcggccggtggcacgggaaggaaaacggagaagcggctgccttcactggggacgctctccacttccacacggccctgcatttcagatacgagccggaccgtgatcgccagtcccagcccgaatccgggaatgttacgtgcgctatccagcctttcgaacgctccgaatatccgttctctttcttttgcgtttattcccacaccggtatcccgaacaacaatgcggagatttcccggccggtattccgcctcaagacgcacctccccgtggaacgtgaacttcagagcgttggacagcaggttgccggctatctgccggatatgcgagctgtcacagcagacaatggcgtctaaaccggagaaggacgcggtgaatgccagatccttctgcagggcggcaagacggtggctgtccgctatttcctcgaatagggcttcaaggttgaagaccgtgttattggaacggaccccgctttcatccagctggtggtattccatcagtgtgtttaccaggccgagcatgtaatcggacgagtgcaggatgttgtccagatagtcggtcctacggctgacatcgttttccgagggcatcaattccgcacagcccctaatggccgccagtggggtacgcaggtcatgggccaccgaagccatcagctccttgcgtgagcggagcagttccctattccgcttgtcggactgttcaagcttcctctcgtatcggatacggtggttcaggtctcgatgtacgacggtgtacagcatgattgccagcagggagacggacaaggcaaggccggctaccatatagtaggagttgtcccgctcaaggatgaaggcccggtagcgttcagtaaaacgctcgttgttctcccgctcgaattcagagaccatgctgttcattctttcgtttagttccacgctgccgatgtataagctgtccatctgtaccagcagccgttcctgtctttcagtctgttccagaatgatcctttcattcagggaatggagcatgcgtgttgttatcccagttggagaagtggcggacagagactgccgtttacgttctgcctcttcccgctgttgcaggtaagcggatttgttctcttttctacggaagatattccaaatatttcctttctttttgggggaatcttccgctccagtactcggaatcatcacattttccttttgctgcacagtttgtttccgagctgttgagacaatggacgggatactttcctgcacaatatcacctataccctgcagttccttgaaagtatgcatcgccttggaaagaagtagttccttattccaaagaagaagacacaacgagtcgatatgttttttcagtaacggagtatggacatattctttcagaaattgcagattgtcacagaccctatggcatttgcggctgtattctctcaggtcgtcatcatcccatgtgacggcagtctccgcatgggtggagaggtccagtaggccgatgtagctattttccgtcagacggtgtatcgccaccagctccttttcctccttgcgcaacgtatgtcttaacatctgctcctgacggaactgatagacaatgaaggccgacagcaggaccaaaatggcataacccagaaatatttttaactttaaccacatgattatgaatcatccgaacctataaatcaattattggcccgtgccaataatatacatataaaaaataatccctacctaggttttagtgcaacttatgtaaggattatttgaaaaatatagattatttcaagttcttcaggtctctcagaacagttttatcagttatttcaataatactgatggcgtagccaccacctgccacagctttcatctttaaagccgatttggcagtaacaatacctttacgaatgccataagactgcggattgttccgataatgcgcatctttaccatcttcataaacagttgcaatgtatttcttgtcattgtcaagaaaatcaagtttcagcgtggataaatgtccttcttcaccactggtacaacctatgaaccaattatttgaaccttttgctttacgtgccgctacaatatagcgtcctggttcggcttccagatatttactctcatcccaatccacgggcacatccttgataaactggaaagcatccatgaaccgttcgtagttttctggtatatcggctgccatttggagcggactatacatggtgacataaagcgcgagttggcgggcaagtgtggagttcacgtgtgatttactatttggattgagtttactcatatccatttcaaagattcccggagtgtaatccataggaccaccttgcaggcgggtaaacggtaagacggtagtatgaaacggcttgtttccgctgaatgcctcatattccgtaccacgagcagattcgttgccaatcaagttaggatatgtacggcacaacccggtaggacgtacggcctcatgtgcgtttaccatgatatggtgtttggcagcctcggttacggcatatagatagtggttattcaaccattgtccataatgatgttcgccacgcggaatcatattgcccacatatccactctttacagcattatatccataatcgttcatcaattgataagcagcttccatatgacgttcatagttacggatagaagccgatgtttcatgatgcatcattagtttcacccctttagactgggcatactcattcagcatcttgatatcaaaatccgggtaaggagtcacaaagtcaaacacgtaatctttggaatggccaaaccagtcttcccacccgatattccatccttccaccaacacttggtcgaatccatgcttagcagcaaagtctatgtatttttttacgttctcattattagccgggtgttgtccgttgggcttgaccttgttataatccgtttctcctaatctcacagaaggtacatcccaggtatatgcccaaggctttccaccggcaatcatttcccaccatacaccgatatatttcaccggtttaatccaggaggtatctttgtatttacaaggttcattcaaattcaagataaggtttgaagcaagaatatcgcgtgcatcatcactcaccatgacagtacgccagggagtacggcaaggagtctgcatataagccatatttccttgtgcatcaggagtaagttgcgaagtaaatacaaaattcttgtcatctaggactaaatgcatgcaagaataatccaccaaagcagcctcatgcaggttgatgtaaagaccttcggctgtcttcatctgcaaggaagtctgtacgcctgtggatgaaaaaatactttgcgacaggttcccgtcaacagcaccactcagcaaactacgaatttctgacagtttcgactcggtatagtcatattcttgtgtatcataatctcccggaatccaccaagctgtatgatcaccggtcatggcaaattgagtatgttctttttttacaacgaagtagggcaaatattgttgcgaagggaactcatagcggaatcccacgccgtcatcatacacacgaaaacggagattcatgaagcgtccgttcgatggtttctccaattccacaaaaagttcattatagcggttacggatatgactgttttctccccatacaggttcccaagtctcatcaaaagtcgatgtagatgtattatttatccggaaagaatccattaatgaattttcttcgttcaattcaatccctagtgtactaggctttatcacaggaatgcccttataagttacctgataagtcgggattcctctctcatttattgaaaactcaagtgtaatattgcccgacggagaagagatgctttctgcttttgccataaagcacgataaaagcagaaaggctgctattattattttcataactatctttctttttataaattcatttatttggaataaacgacacggacctttacttcggttgtacagtcagtgcaaggtatatcaatgttcgtacattttctttttacgtcataagaataattagaagtttccactccattcacttttaccgctacaggttgcgtcgtattatagatgcgaaaagtatatgaacgagcattgacaccgttcgtataaattccctgacgaggagtaatgacatattctcctttattatttttgaatgattgtcttaagattgttgttgcaaaaacggtactataatcattattatcaccatcatcttcatacaataccccctcacccttgcaacctgacacgaagtttaaaatcagatgtccgggacgttctgtcacattcattacagtaggaggattataaggaataattgcaccttgtttaaaaaaatacggaatttgctcctgcgtaaaacacattgtttttctgcacggtccttcaatcaattcatctgtagccacactccaccatttcccctcaggaaaccagatttcttttgaactgataccatcttccaaagccggttctgttatcggagctactaaaatgtcgtttccaaagaaatattcaccttcatatttatatgcctcttcactttcagggtattcatagtaaagtggacggcacatacctatacctgtatcaaatgtctcacgagccattgtatatatataagggaagagtgcgtaacgaagttttacggcatcgcgtaacttaggaaaattgggaaatttccatatacgccgttctatccggctgtcatcagtggcatgactgcggaatataggggtaaacactccaaactgaatccagcgaagcattagttccgggtcatttacaattttttcatcggtaaacgcatggcctccaaggtcatgtccccagaaagcgtatcctacatttgatgcggtggaagtaaagtacggctcaaatgcgagagtcgggaaatttataagggcatctcccgaaaaaccaatttggtaacgatggctccctaatcctccccaacgatgaaagattacaggtcggcggtcaggcctgtttttaaccatatcattgtaaaacacatgattgcaccagaatgtctgtccaagaccgggagtatatggactcgtaagatgttgttgccagtcgagccaccagaaatccacaccttcagattcatggtcacggattacgttgtcaaagaatgactttgtaaaatccggataatcaagataccaggcaattttgccgttactaccatatttaccgccaagttccctactcattgctttgtaataggatggagattcgatactgtcaatgccatctgccggatggagatttaaagcgattttgtaaccgttgtcatggatttcctgaagaagtttagtcggttcaggtattaagttggtattccaagaccagccggtccaacctccgatattctccgactcacttgatgccttgccattccaatgccaatccatatcaagaatcattacgtcggtagggatatcgttcttcttaatttctcgcataatctcccgatagtcatcggctgaatatgaatagtaacggctataccaatagccgaaaacgtatgccggtggtaaaggaattttaccggctattttggtaaaatctccgatagctttcttatattcattgccatagcccataaaatacaggtcaatagcctgagggtcattacgatatgcccaccagtcatatccaacctccggatttggctcaagtgcaaatgagtgactcccgtcagcacgtgttgcttcccatgaatcatctattacagcccaaccggatcgggatattaatccgttttccaattcactccgtttattgtctccattgctaccgtcaagagtccgacaagtccctttaaggtttagcggatcttttttccctggataccaaagtgtttcacagccatggttttcaatggtaatagtgaggttttccggagatgccggacttgttttcggattggttccttttcggtatttgagttttactttatcagtctggatatacaagaatcggtcatcttcttttttcttgaaatctaccaattcaagattacggttgacaactgtaaatgtaggacggtcttcgaacatgcctttttcactatattctatacgaatcatttctggagtcagtactgtgaagcgtgcattgccacatataaccactgccttggaatttgctatcggattattattgtcaactgtagctcgaacaaatggtgccatgcttagcatcaccgccaatcctatccacttcattattctttttttattcatataaatgtactgttattaaattatttggtcagtttcaaaaccttgcaagcccgcggccctaattcaacactcaatttagatactttgccttcgtctttgtgtttccacaagtcgcgtacgcttacttctccttctataccaatctccgaaagatgtagttcatatgttttctgttcattgtcgcggttgaaaagtcctactatataatcaccgttagacatctgtccgtaccaaatctggttcttttcagtgtcggtcacgtcacccgaaagaggctttcctacgaatctgtcggcattcagtgccaacatttcctcattctgataaaatttcaggttatctcctacggtattatgtcggtcagctaccgttaccggccctcctgctatcaactgcaaagaaataaccgactctttttccgcatcagtattaaaggtattaagacggataaaatcgccatcaggaattacttgattacgtcctgttactttcgaccaatatataaatccatcaaacatattcatgctgttgggccagccttcatacactttgcctcggctatcgtcagaaaaatggttccatccaccttgacctgtatctgctacaatacgcaccatattaccatatttcctttccaactcggcattatttttaagatgtggcataaccaatgaagtaaaaataccatagcgagtggccgaaatacagatatactccaatgccttttcataacattctcttccatagcctctgcccacaagtccatttccccaattggcttccatgccacggtcaaatccatcttcataccaactgagaaaatccatacgaatatattctactcctaattccttataatgtttgaaaaagccgtcaatatattcttttgctcctttatgggtagcaaccacataagtaaagaacttatccggctcgtccggatgcgctacaacatcactctcggcatcatacttcaattgtcccaatgtaatgttattggtattctgaatgggagtttcatcttttccgtgtaaccacaacgggttatcatacacacctagtttcaacccttttgccttacatttagctacaagatctttcaaatacatgctaccatatttgtccatgtagccgtattcattcttttcacaaagcataggaataaatccatccgtacaaagcatatcataaccataaggtttcagattctcggcaacccagtcaatagctttgtcccactcttctgcattcatatccatttgatattcaggaataccattatcagccatttccatacaaaactcatatacactccaatagagtggggctttgaatttatggatattgctaatatccacctcttcgtcataatccggcacttccacttcatcatcgggaatcatatccggagtccaccctgttccttcgtccttacagcttgtggaagtaaatattcctatcatcaacaagcaaaacaatgttattttcttatattccatactactttttcatttctaagcgagtgcggaattaaattgtccgcactcgtaggattactaatttttcttttcaaatttaatcttattagtcaatacattcagttctacacgatactgaccggcttcactttcttccactttccactggtagtcattaccattcggttgaaccaactgcacatcagtcatgttaagagaagcttttccgtcttctcccgcctgcttgggcatataacaagtgatcgcccaacttccatctacatttatcggacatttaaagctaccagcttttaattctccttcccaatagaatgttcctttatcaacattgaaatcataaacgaaagcttccttcccttgctcccaaccggcaggagttgcatcacctaacatccatatctctttgcagggcagatcatcaggaatgctctgtaacagcttgaagtcaatagtcatggtgtacatgttcagtgtcacccggtagttgccttctttggtaatgttccatttgtagtcatgtccctgtataccggcctcgatgtgttccatacgattatctccaaattcatgcgttccgttttctattggcatcagccatgctacattccagtcttctttcagttccaatggaaatttcatatctccggttttcaggagaccttcataatagaaagccacttggttgactggatctttcgtcagttttgtggaactcatgatgttccaacctgcaggggttgcttctcctaccatccaaacatcattatagtcggtagtcgggtaatctgcattcaatgttccggcttcaatgttcaatttcaacacataaaatcctgctttattaatggtaaagggggtttcattaccggtttcatgctcattaaagaccacactgccgtcgctaccctgtgtatacgaaggtgactgtccggtggtattcaaaataaacttgtagtcaccttctttcatcaccccgtaccaggtatatacctcttccgatatctcttctgtcattttaagcgcattggccgggtcagtagctccttcaagtgctgttcccatgacatagatgtcgtatggctgtatttcataccccactgcgtcaaaacgtacagttgatagttccggtttcacatagcagtcggtctcttctatttctgcgataatttcagcttccaatgttactctttcaccgggttctattttccatttcgtcaataatgcgttcatttttttatgggtaaagcttacactgtgctcgccggccggaattctcattttgtcaatagaagtgccgaaatcattgtcagcaatgtccaacttaaaatagtaagtcactttagagtccaaaggggcattggttacctcattccatgaaaaagtaacagcctcctcctttccaaatttctgattcaattctacatattcattcgatacttgcaagtgcatggtatcatcgggacgctcaatactataacgtatatcttcatccttacagcctactatcaaacaagaaagcatggcaagtaaaaaaaagattttatttttcattttgcttgattttatgggaattatctccaaaatggaagttgtcgcagattctcgtttttatccatttcactttgatggatagggaaccaataataagcaggattatacacacgtttctgataaggtgtacgtacataaaaagcctcagcgtcttttccgctataattcattccgtacatatctccattcagctttttttcagcttctttccaacggcgcaaatcgtcataacgcaccccttctccacaaagctcgacacggcgttcggcacgaataatcttacgcacagtctcttgattatcgtccacatggatattctgggcatcactattaccaaacgtataagtacgaataccagcacgtgtacgaattttattcacatagttcaaagcttcctcgcgaactgtacgttcatctttatactcattcaatgcctcggcataattcaaaaatgcttctcccaagcggtaaacaataccgggacgatactggtaattgttctctttaacattcgtcttaggagacacccgtttacggataagataaccattttgaggcgcatcgtgcgtatgcggattgtctttctgcccgttaaaaaactcaaatttacgtttctcggtagggaaataagagttattaaaagctacggatacatagaagcgcggttcacgattacaatacatattatatgtacctgcataagtaacagctcctccatttacttcttcgtcccagattgtattatcaagttttacgtccgattcggaaaatccctcttcattcgaaccgtcataaggaagtccgtcttgcataaagaaagcatcgaccaaagattgagttacccctaacccgccgctaccgccactggcagccggtgttgcatgtttttcgtatgaaccataatcagagcttggacgcgcaaacagaatttcggtgttcccttcatcaaaacgcttcaaaaacaagttctgataagacataaacggatcaatctctccatttgcattttcttcaacataaagcttatatccggctttatcagcctcatcaatcaatagtttacacgcttctactgcatttttccaacgtgtcgggtcataaacggtactgaaaagattttcacccttctcatttttgaaatccgcataatccgtattcccatttaccaatggactggcagcaaaaagtaacatacgtgcacgcactgccaaacacataatactggtaacacgcccatactttcgcgcttcagtatatttaggaggtagtatcatagaagcctcaagcatttccttgtcagcccaatctatcacagtgtaataaggagcctgtcctttcatcaagtccgacagtacaaaatctgttggagcaatataatcaggatcaaacggaacagctccataagtattggcaagcaagtaataataataggctttcatgaatttgcactccgttttcatatactctacttcttttgcacttataccctgtgctggtagtgggtgtatgttctcaaggaaaatattagcctcccgaatacattgcggaagaagcttccagtaatttccttcccaatcactgttaggtgtccattcacccaatatataaggaatgactttccacccccactgccgccaacgttcggacggagtcagatcgtcagctaggacttcccaacccaatgtgttagtataaccccaataaggatcgggtatagccgagtagacattggcaagccaaccctcaatacgggttttgtcttcaaagaccaaaggaagagttaattctgtatcagtttctttgtcaagatagtcaacacaagacatcaatgaagctgtgactataaatcctataagaatattttttataaatttcattgttctttttctttagttcattctatattaaaaatttacttctacccccaacatcaaagaacgcatggacggatattttaaaccatcagaggtggccagttccgggtcccataatttgaacttggaaatgtagaacaagttattcccactggcaaagaatcggatactcttcgcgctaattttattaacgacattcttaggtaggctgtagcctatttcaagtgttttcaaacggaggaaactcatatttttcttccagaaagtcgaggcacggttattgttcgtattagtactctgagaaagacgtggccaaaaaacgtcctgagaaggattttcttcagtccagcagtctgtatagttggtatagacattacctaatacaccggctccgctaccgggaatgaaataatccgacccaccgataatacggtaagtgtcaccacttccttggaagaagaaactcatatcccaattacggaaattgatatttccgccaaacccataaacgattctcgggtcagtagtactaccaatatagccttcgtcagcactagttatatagccatcgttattcatgtcacgatatttgatatcgcccggacgcacttcaccgcccagttgtggaacaggaattccttctttcagctttccatctacgaaatcatcatcggtataaagtcctaaggcttgcagcccccacagcgtattgattgaatgcccggtaatagaacgataagttcctttgactgattctggttcgtctcgttcgatgattgtattcttagcataagtaaaagttcctcttacgctgatattacaatccttattgattcgcttattgtaattcagtgacagatcgatacctttgttgtccaccttgccatagttggcatatggattgttgataaacccggtttgggtaggaatggtggcacgttgcatgaaaatgctggtcctgcgttctttaaatagatcgagttgaaaatcgagttcattccaaagacctatttctatacctatattcgttttaagcgctttctcccaggtcaggtttcctacaccgacttctccttcctgcacaccgtcacgataagtatctcctgtatatccccaattgtaaccattagcttttgaattgatggttgtgatataggcgaaacggcgtccaccgatattgtcatttcctaccgttcccacagaggcacggagtttcagtttacttatcacattgcgtataggttccatgaattgctcctcactaacgagccaccccaaggcgatggaagggaaaaaaccaaaacgcttgcctttcgcaaagttttccgaaccattatatccaaagttgaattcagaaatatagcggcggtcaaatgtatatgaaaaacgtcctgcaataccttgtgtccggttcggctgtatatcgccccaatcatagctgcgttgattatacaaaagaagtgcatctaccatatgtctgttattaaacgtctgattataactgagtgccgcttccaaataaacgctctggttaccgtaatttgcattactggaatggtcaagaaactcacttccgtatttcaagatgctatgtactagttcaccttcatcattgcgtgattttgctacgctataatagtccggctccttaccacgtgtcacaaagttctcattatatgtatcaaatgcaaaagtgagcttagcttttagtcccggagttatcattttaaggttctgctcaacagcaaacaaagattctagtttgcttcgtccgctacggtagtaaccgttctgtgtactgatagcccaaggattaggacggttgctactggcaataggaatagtcccatctgaataaacagcggggtgtacaaaaggaggcgtttcaaaagcagcactgaaaacttcatccgtaccactgcgacttttatgtagattctgtaagtaaccacctacattaaaacgaactagggtagtttttgtcaagtctagatctacatttgcccgtatgttgtaacggttcaacttgctttgggtatcataaggcaaactcttatcggaagccataattccattttcatgataaagagatgctgtaagagaataacggagtatttctgttccaccacttactgtaagattagcacgagtggaagttgcataatctttggtaatggcgtctatccagtctacattcggatataaatctttgtcgtagccataataagttttaagtatctgctcctttgtaaacatacgtttattgggatcactttccagagaattaagtaaactcatatattcagcagctccaataaactcaggaagtttggtgggagcctgaatggactgctctacacgtacattaacagaaggagcggctatcgttccacgttttgtattgataataatgactccattcgctccacgtacgccatacatagcactggctgaagcatctttcaaaacagaaaaagattcaatttcagcaggatcaagatcatttaagctacgttctacaccatctaccaatactaatggagaagtatttccactgaaagaagcaatgcctcgaatccagaaatttgagttatcatatccgggttcgccagatggctgtactgcaatcacacccgctaactgtccggctaaattgttactgagtgaacgggaggacccgacttgcaacttggtaggttctatagtctgtaccgaaccaataactgaaagtttcttttgattaccataacctactaccacaacctcatccaaagcttctacatcttcttctagtataatattgaagttgatttcatttccaaccacgatttctttagacttgaaacctatgtaagttatatttaatacactctgtttattcggtacctcaatatagaagtgaccatccacatcagttatagcccctcctggctcatttttgactgtcacattaacacctggaagtggagatttctctttatcaagtacggttccactaattcggataccttttacttgctgttggacaataatactttctgccatagactcgtcagcataaactggaaagaatcctatccacaaaaatagtggcgccagaatagtagtttttactttcatagttttttaaattaaaagattaacgtcattgattacaatataacagcctattaagcagaacgacatatcgcgggtctggatacttgttggctattcgaattattaccctttgttttctagttagattgttcttttgcatacataatataagattttaaagttgataaaaaagtataaattacaaactatctctttcttgggaaaagagacaacgcaaaaatatcagataagaaatactaattatgaatcaaagagtgaaaaagtagtgatttatatcaatggaaaatgtataatctactgtatattagtaatataaaaacgtgtagtaaaactaaaaaagtagtaaaaatataagtgtaaaataagaatattctgaatcgtaaacttctattagtcttttgactttccaattttcattacctcttgttctagtaggttacggtcaccagcggccttatttcgaactttcgtgcggtaattataaatggtggttacagaatagcgtagaaactgagcaatcttcacgctatcactaatacccaagcgtatcaatgcaaagatgcgtaactctgtattcatccgttcaccggttttcaaggatatttgctcatcattggtaagcaaggcattgaaatcctccacaaaagtagggaacatttgcaggaaagtattgtcaaaattcgcatagaattccttcaattccccctctataaatttggaagacttgatgttcttgtagagttcttccacattcccagtagcagcaatcttacctaatgaccggcggtaattgtccatcttctccaaatataccgaacactgatccatatatcgaccaatatactcctctttcagataagaattctctgcaatactgtggttagcctccttaagcttgtgcatcgaaaggtgaagttcttcattcagttcttttaaccgcttgttggtgtcaatcacttctttgcgagcgacagccaacctcttcatctgtttatatacataaaatatggcaagcaatagaaaaaatgaaagcatgctgatagatgccaatgtccatttcatttgttcctgctgtttctctgtcttttgttggtaagcatcgttaatgatgggaaatatctccaaaatctccaatttgcgcaaccgagcattacaagctgcggcatcttccatacatatctttacataagaataggcacgctcgatatccccctcttgataaagcaatatggctagcttacgcaaagaaatgtattcccggacagcggttgtcatatctgctatggcagaaacaatcagaaattctttttctttttctttatcccctttcagacgataggactctgataaagtataggcacaaattgcaacatcatgttcatattccttctgctgggctaaataatctgtcagtaagcaaatggctttatcgtattcattgcgtacattatactggtcggactgaatcaaggtatgtatcaaaaggttatccttattgactagtagcaatgaatcacgatatttgtccgtaagttccgtataaagtttcctttcatactttgtaactgcatagtcagccataagtccatagattgtgcgatagatatgataataatagggacggaggtttttcgacaaccgttctgcatgaatatttcgcatcaaatccattgcttccttatacatgcctgtcattcccaagacatcagctttattcatacgggcattatctatatattctcggtttccaagacgcatagctatctgttccctctcctcagccacataaaatgctgaatccgtattgaatgaacgatattcatccaataatgcaccaagaatggcaaaatgctcttcctccgatattaactgtaacaactgccttctcagttttgccagtctcaactctttttgttccatatatataggacgtttctttatcgactgatctaatttcagcaataaagaatcgactcggttactgtctatagcataaacataacatatgccaacgatgcaaaaacaccaaaatacaactatacttttcatagcttaacatatcaatcaaaaactccatatttgaaagtttttacgcaaaagtaactaaaatacaaaagaatttatctcctttatatgaattattttaatattcatacagtatatgttcacacattatttagtctaaaaaaataatactatagcgtattgcgatggctttatttaacaatttattaccaaagccatatctgttaaacttataacatagaattattaatatgttttactctgacaataaatgtattttccaaaaattatattgagctgtgataaatacgatagttatgcttgtttaaacagactacgaatcctgccatatttcaattctctttttcccatataacgattttcccgtttttatttatcccgtcagtagctccaccttgcgtggttcagggtgcgaagctacgtacggggcccctaaaaatctgcaagcccgcttcgcgccctgcgggttttggcgaaaatttttcaatccgtccagccgggcggttgaaaatttttcaccaaaagccttgcatattttctccccgtccgtatctgccccctgaaacgagcaaggtgaggccaccgacaaggcataaaaaaaaagtcaatgttatgaaaaagagaactgaaatacaacaagatttgaaacgaggcttcggctccgctccaaccggcattaaaaatttggtgaagtggttgtcggtcggttttgttgtctatgtggcagtacgttttgtatgtgcctttgtcggtggtgtggcggccttttggggcggttggttgcccatgttggcagttttggcggtagtggttttcctcgtccgttccgtgtggcgcatcctttccgctttcctttccctttgcgtgctcgctcttttcatccttgttctttgcgtgatactctgaaactaaatattaatcattaaaacaactcattatgaacaaagtacatttattaggagctaacagaagttacgacagagacgttcaaaccgtttcagtcaatcaagtggtagtattggaaggctacagctatgacagctatgttgtgtatgaagtaacccgtgacaagtggggaataacctatcatcttgtcaatttggaaacacacgagtttcacacttccgaccttatccggccattatcggagaaattcggaataggcatctattacgatgatgcgaaccccaagtttttggatccgttggaaacagccgctttactaaccaaagcgaaagagaagaaagccgaagcggaacggaaagtgaaggaagcaagggaagaatacgagcgtatcgcaaaaatcggtgcggaacgtttgcgcccccttatcccgacagatgcaaaggcggccattatcggcacgttacgggtaagcgagtgcgatagctatacggactattacgactatagtatagtaagaaccgtcatcttaggcttttccaaacatacacgcaacctcttttcagaaatgcgcaagcatgccgccaattttgagggaacggcctatttggcagaatataacgcagattacgaacaccgtgaaaattacagcatgggggacggcatgtatttgggcaggaacaagtacagcggttggacgattgagaaagagcctatctgtgaccttgaaaagttcatagaacggtatgcgcacaccgcaggggatgaagccaacctttgcatgaaagcaccgcagacggacagtgatacggcagaacaatccacagcaaccgcagacctttcaaccctcagtcttgaaatcgtggaatacagcgaaaaggcgatagccgtattcggtgacaccaagccgataaaggacgttctgaaaaacttgaacggtctgttccgtgcaaacctcacttataagggcgaaaggcgtgcagggtggatatattccaagaagcaggagctgaaagtaagggaagcactcgccacgtgcatctgtgtatgacagcatgaacggcagggtggagcaatccgccctacctatcaatgaacccataaaaaagtaacgacatgagaacagaaacaagaacatacaccctttctcggataaccgagttatccgagaaagccaaagaaaaggcgtataatcagtggttatgcaatggatacttttacggttggacgcacgagaaccgccaaacccttgatgccttttgcgaacgcttcggtatcgtgtgccgtaattggagatatgacgcatgtaattatagctatgactaccgcagcaggcaggaagactgcatagacagcctgagcggttggcggttggtggcctatctgatgaacaaccattggaacgacttatacacccgaaaatatttttggaacggaaggaaagggagagaaagcaggatatttgtagatacctgttgtccccttacaggctattgtattgataacgatattctcgatccgatttatcggttcttgaaatcccccaccgagaatgtcacgtttgacaaccttatggacgaatgtctcgacagctttttccgtgcttgtcgggatgatatggagagcacccagactttggaatacttcacggaagaaagcaacgccaacggttgggaatacctttcagacggaaaactattcaattaattattaacatttaaaaacttaccattatgaagacgaacaaaaaagtacagaagaacaacgtacagaaatcagagaaagaaacagcagtaaaagtaaccgctttggcaatcatcccgaagccgatgaagttactcacatcgcagaacatgcccacggctaccgaagtgacggaaacacccgaagcagcaacagccgtacccgaaatggcaaccgttcccaccgttacggaagaagcaccgcagcaagccgtgttcaagacaccgcttgcaacggccacagccgaaacagaccttgatattaccaccgtacacccaagcgcagacaaccaccgcaagacgttcaaagacgcatcattgcaggaactcgcggaaagcattcgggaagtgggaatcttgcaggccattgcggtacgcccacgcacggaaggcagttatgaaatcatatacggtgaacgccgttaccgtgcctcattgcttgcaggagcaaagaccataaaggcaaccatatataacaatgtgacggacgatgaagcggaagacatgtcgttaagcgagaacttgcagcgtgagcaggtacgccccactgaagaagcaaaagcgttcaagcggttgcttgaaaagggcagatatgacatgtattcactgaccgcccgtttcggacggagcgagaaatatatctatacccgattgaaactgaacgaactctatgcgcctatcggtgaactgttggacaatgaaacaatcactgtcagcatagccgaggagataagcacctatgaacccgatatacaaaaggacgtgtacgagaagcacctcaaagaggggaacggtgaggattggacgggatatacattgaacctcttcaaaaggtactttgaaaaatactataccaccgaccttgggcaatacaagttcgacaagacggaatgcaagacatgcgtacacaacgcagccaattacaacctttttgccgagcataacgggtgcggacactgcaccaaccgcaaatgtctggaagccaagaacgcagcccatgtggcaaaagagacggagaaacttttgaaatccgatccgaagctggttgtcgcacgcccctactacggaagccgtaacgatatggcactacagaaattggacagaaaagggcatgaaatcaaggaacttgactacaacgtatcggcaagggaattccccaaagcacccgaagcaccgaagaaagagcagttcacccaaacgaaagagtacgaacaggcggtgcagacatttgagcgcagaaacgaggaatatgcccgaaaggtggaggaacttgaccgcatgaaggaggaaggcaggataaaggcctatgtaaaggtagggcagacagaacccgaactctgctacgtggagataaacaggaaggaaaccgctcccgtcactatcgggacattgcaggaaagggacaagcgtttcaaacagctttccatcgaaaagaccgttgccgatacgaaaaagattgtccgggagaacgactatcccgaaagcccgttcacgcagtacgaagacggtatggtttattttgccatgcttgcccaacttcaaaggagacatttcccgcttttcggcatcaaggaccagcctttcgcattggacgagaaacagcggatgaaaattgtagccaaactgacggatgcacaaaagaccctcatcaaacgggacttcatcagtcactttctttgtgagaacggtcacggagacaacaacgcatccaagctgttaagagacttcgcaaacatgcactttcccgaccagtacggacttgccaaagccacccacgaggaagaatatcagaaacggcatgaacgtttggaagaaaggataaaggaaatgaagaaagcggaaaagaaagcagccaaagaagcggaaaaacagcagacagcagaaaagacggagaagaaagtcgccgccccgaaaacggagaaacccgaaagcggaaaagccgcctgaagccgaacagaaagcatgtgccggagacaacatccggcacatctttttccacgcccccaagagaacagagggcaggggcggactaccccacccacaccgccaccgtaaaacctaaaaaataccagcgtatgaaatatataagaatgtccccgaacgtggagtattccaccgacagggagtttttccttgaacatcaaattctctgcatcgtgagcagggaaggtacaaagttttgcagcctgatagagaaccgtctgttcatgcgttccctaagccgccatatcagtaagcggatgcaactgcatatcatgtgtgaaatccacgaggacatctgccgctttcgttatggcggcgagcccgtggaatgacctgccacaccccatacctgaatatcgcttcttaaaaaagtcgggcaatcgcatagggattgcccgacttttttctatttttgcagggttgaatcaaaaaagaaagttataagattaaagaatttgaatgataacatattagaatagcttttagctgtttattcccggacacgaaacgaccaattttaatgcaggagaataaacgagcggagtccttgtcatacactaatggcacggacttaactcgtctcctgcgaggcgcttggtcgtgcctgtgttcggacttgttaagttccgtgctttttttcggcacttgacagcaattacggacaaggtattaataaaaaactcataaaaaatgtacgacaagaatgttgccgtcatcggctgtaccattgaaaagacaacaaaatacgaccaattcagggaagataaaatccgtatggaactctaccggattatcctttcactttataatgaaggttatcgcacattcacctgcaatccgcattcctatatcggattattaggtgcggatacgatagtcatgctacgtgaagcgggcaaatgcccggagataatcctttcagtagccataccggaaaccgcttttccggcagataccgacaaggtgtatcgtgccttgtatgacgacctgataaagcaggcggacaataaaaaaatacttccgaaaaaagagttttttggcaatgcgcttgtcggcggtcatatcatctgttattacgatgacttttccacagaaatgcagcagatatacgcatccggtactccttataccaatatccgtcaaaggatataggcggcagactttacggcagtttacaacagcttttccagccgtgcaatccgtttttcggtggacgggtgcgtactcatgatatattcggtgaaagtcggacgctcaccgtaaacgtcttccgtccttttcaaccggcggaggaaagaaagcaatccttcgccgcaaccatatttcactgcataggcatcacaacggtactcggcatatttattgatattcacgtcagttatccggctgataccgtatataatccggtgaagcagtttgtaaacggcccaccataacttcgctatgagttcacccacaaagcccaaagccggaaccaatgcaaacaccatgctgccaattatcccgaatatcaaagccggaataagaaatataccataaaggcagcggtaaccgaacgactccatcgagaataaaagcacctgatagacgaagtcgtaatgggagatatgccccacttcatggctgatgatgcccttcagctcctcatccgaaactgcggcgagtactccgcccgtcagtcctatcgtattgaaaccgaatgcggcggcatttacccgagcgtcattgttacgataaagtttcagcttccggttcatacccatttctgaaagcaaccgttccaccctcatacgatcggaactgttcataggacggtatccttcttttctgcgtagcacccacacatttagcggagaaatggaataaaggatgaataacagcaaaagataatacggtaacgtattgactaaatacggaatcaccccctcatcaaacagccccggtatatatgccggccatatatggcgcaagattgaaagtagcaatgcgtaaaacaccgtaataaagacaaaattcactatcgtgacataagccagcagcaacagcttgctgatgatacggaatattctgagtgttgttttcatgcgtatatgattgaactattaacttccggctaaatataaaaacaaattttgtgcaatccggaacaattacttattcatttgttttcattaagcaaatttcataaaacaaagacgataggtttccccaccgtctttcttgatagataatggtagcagttattcctttgccgtagtgctttctaaatcgaacgtcaccgtcatttctctttccctgccaaaattatcccggacaaagaatttcagttccgaacgtctggcgcttgtcgaacggtaaaagagggtgaatatctgcctaaccggattttccgtatccagtcccggcacctctgccagcggcctcacttcccggttcacaagttttacgccttcactgtcggacacttctcccttgccttccatctgaatgtaacctatttcatactccgccttttcatagtccccttcacggtcaagataaaaacgtatctccaccgtttcacccgttgcgatctgcttttgcagataccatgacgagaggctgaaatcataatcctgccggatgtctatatcatcgttgcaggaaccgaaggccagcaccgcaaagagtgcgcctatacatttatataatacatttttcattttctgtttctcctttctctttttattagttaataataaggcggatacccaaacctatctgcgtatggaagttccccgcatccgttccgaacagcgccctttccttgacttgcagcaggaagatgatccggtctgtcagatagacatcgaaagccgccgtcagtcctccgccataaataaagctgtccccgtttgtcactgccgccccgtcaggaagcagggaagttccccagttgactgtctcgaaaccgcccaaagcggaaagtccgatacggaaacagacattccgacccttatccgacaatacgggaataaaatagccgagttcccccgtgaactgcgctttgggtattgccttattttcgtaggtgtactcctttatctgataatccagaccatacagccagtaggtacggttacggttggtatgtgtaaaggccagcgaggtgaagtagtggcgttcgccgccactcttccatgaaaggaaatgattcaccccgcccgatgtgaactgtatgcctgtctgtcccggcaggtcacgctgcgcatatgcttcgcccgcaaagagcgacaacacggcaactgtcagtatgaatagtattctttgcatatacattatattatatataggttattatttcagatgcagttcactgattggttttgccgccacaaggtctgtgttctctatgcggaacgactggtgacgggcaccgcccttttcgtaaacctccaccacaagcagtttgtcatccggcagggtgagcttgggcagcacgaatataccccgcaccgtggctttcccatccaccgttaccaggcggttgtatgtccttacaggttctatgaagttctcctgcatggccgtgcgcttggctactttcttgtccaccactttgaaacggatatagtcaatgtcgaacgatatatccgaactattgcgcagggaagtatgcaggtatagcaggtcattgttgatataaatccctttgagcagtgtctgtatgccgtacttcttgcagccgatatgcctgaagtcccttttgttctttttatacagcgtgtacatgatgcggttcaccaccagcggggtctccccgccgagttctttcagcttcacgaacatgcggtcgcccgcaatcccgccttcgggattgtcccggagccagtcttccatctcaatggaaagccaggccggttcgtccttataaaccacattaaaagaatagaaacaaccgtcggcagtgatgacggagaagttcgtttccccttcaaaacctttcaccgccgccttgatgcgtactacattttccgctcccgtggccttgtccgctatgatgtcgaacgaacccaaatccacgtatttcacttcggaagggaaaaggatatgtacggttttctgaaaagtcacctcaatcttatgcggtgagataatctggttggtggggaaaatctttgtttccaccggttcctgcgcctttaccgacaatacggttaaaagcattactaatgataaaataattcttgtcttcatctgattactgctttttggatattaataaaagttgataattcgctttcacagccaccttcacctcacgcatctttgtggccagatattgtgatccgccgccaagcacgccccttgtcacgtccatgacgagttgttgcgaggcactgcgtgcgaacgagatgcttgttccgaaactgcccccgatattggcggcggcttctttcatggcggtacgttctgcggtattcggaacgaaaagtccggcctgcccgtccatatcgtaagccgttagttccaccggcaggatattcccgccactctctatggagtttactgtgactgccatccgctgcccttcgatacgcaccgtaccatatagcggagtattggcaggtacaagcgcaccgcccacttgcagcggttccagcaaccggaacttcagtcatgctccggtggtcactgtctggtcttcagccacgcaggcacgtatcgtattggctccggtaagctgtccgccgcccacggcagtggcaaaaccgtaattgcggggtatcgtgtcgggtaccggaggtacggccagtgacgaaaccacattctccgtagcacgtccggcagctatagcggcaggattgccggatgaaccgcccgtaacgcccgcaggctgtatgttcttcacctgtccgcccgtctgtccggggaaatagcgtgccgccatctcatacgacttttccatcagttccagcgggtcttgtcctttccgttcgcgttccagcttttcgttaagctccttcacctgccgttccagttcgtccaccctcggactctccttcggttcctgatagaacgaggtgatctgccttgaaatctgccgctgtttttctctggactcccggatagcatccgctttcggtacatcttcttccggtttcagcccgtccgttgtgtccggtgtcagatagcccccggccacatcctgcaaggttcttaccttctcctgcctgcgttttttcatttcttccagttcgtaagccttctgtttgtcggccatcgtctccggtgcgatagcgtcgggtatcgttgtattgatgcctgccgtcccttccaccgtttctggcgtgtccggcttgaagataaaccagatgaacccggcgcaaagcagggagaggaatgtcaccacgccatagaatttcagcttgtcggcaaccttgcggtttaacttcttctccttttcggatgcaggttccgctttctgcgtttctttattcttttcttctttcttatcggattgtgtcattggatacattgttttttaatggttggatactgtccgtttggggaaacgcaatcctttggagatgctgtacctcaatcggaaatttgtctgtcccgcagaaaccgcccacgatgtaggcaaggtcgatggcggcgaagagtccgagcaggtaaaggatgataatcctttgctgccggtagctcagccgttgccaccgtctgcggagttttgctgtatgtcggtctttctccgttctgaacgagtggaagaccttttttatactgttatctttcatactgtccgatgtccctgttttcgatgatggtaaaactctctatcagaaagccctgcggattgttgtcgctccgggttacattcctcagacggcaggtggtgacaagcgacctttcggtaacgctgctcgaacggatgatgtgctgccggctataggtcttcatctcgtatggataactgttgaagttcccctgtatgctgtccaccgtcagcgtctgcgagatgtttcccgcgatcatccggttgaagtagcctttctcctgcaagttccggtagtaaccgatggcgctttcatccgaaaggtaaagggcacgctggatgttgctttcaatggcgctcttgtccggtgacagggtgaaaaacagttcgtggaaacgtctgatatgttccctcgcttccacggggcggttctgctgcatgtcctgcgaaagtgccagcatcagcgattttccgctgtccagtacatagattttctgccgttgcgcctcggcaaactcgtatgcctttcaggtggcgaagactgttaccagtgcgcatactcccagaaataccattccgaacagccgtagctgccggaacgatgtctcgatattttttaatgatttgaactccatgtcttctttctgttttttaagtgatacgtttagaacattttcttgatgcgtccggctaccgatccgccgactgctccaccgactgccgccgcaccgtttccggccattttcccggcaccgcccaccttctgcccgtaagctcccgcaccgcctgcctggataatccacgaggacactgtgggaacgcagaaataaccgatgatacctataatcataaagatgcaataaacgctgttcgaagcatccggtataaatgtcgggtcctgcatctgcttgatgtcctgctgcaacatcagaatctgtatgcgtgagaggatagcaccgaacaggtcacctacgggcagccataagtaaatacagatatagcgtgacagccaggtggtgagcgtactctggaatccgtcatagacggccagcgcaaaggagattggccccagtatggaaaggacaatcaggaagaaagtcctcagcgtgtctatcagcagcgaggctgcctgaaagaacagttccaacagttcgcggaaccattgccgcaccttttcccccatgtcatacaccgccttctgcccgtacatgtttatcatcgtgtccatgtcccccagcgaccagccaagctcgtctatcttcttgtcaaattcctcatcactcacaaggaaagcctttgccgggtcacgcagcatcgcttcccgttccagttcgtccttctcttcctgatacttcttcatgtcgaaagtctgctgttccaccagtgaggaagtggcactgcatacgggggaaagaatcccgttgattgtccccagcaccatagtaggaaagaacatgatgcaaaggcccagcacaaatggtctgaaaagtgggaacacatctatctcttccgcccttgaaagggactgccatacccggtaggccacgtagaacagggcaccgataccggccactccctttgccacgcttgccatatcctcgcacagcggcatcatctcatcgtaaagcgaacgcagcaactcatgcaggttcgtccagtctattgatagtaataccatagtctatctgttttttaaggatgaatgattaccagtaacgctggtcgtgtgtcccgtacagggcaagtacccgctgggaatcccccttcttcttgctgcgcaggtacgatatgccgatattctttcgggtatagtaccatgtcaagttcttgtattccagcacttcgccgtatatccggttgatgatgtccagccgttccttgtcggtcatcgagagtccggtagccgtggtcacttccttcaagtccagcagcaggttactgctttcttcaagcagccggttatacccgaaagcaatggccgagagttcttccacggtaaaattcgggtcgcccatcatcgtattgaaattagtcacgtaaatatcgctgatgtcacctaccagaaggatagtctgttgtaccttgcgtgccccttttacgagatcgtgtacggatttcaaagcatcgtagtaggcctttccctgctggtaaatctttacagtctcctgaaagttacttcacatgttctgtgccgttgtggaagtctgtacaatttcattggccgagtttacaatgccttgagcaaggttcgtagggtctatcactgcccattgtgctttgcttgtcaccgaaagggacagtagtgccatgaataaaattatcattctctttttcatgcgtctatctcctttctttggtaagtaaataccggctgtcgtcatcacgggcaaacagtccgtaacagccgaacagcaatacctcgcttccgctgaaatacccgatacatccggcatccttgttcccgtgcaggaaaaggtcgtcccctttacggagcgggatattgatttcggtataactcatttctccggcgaacagcgtggctttataacccttgaatccgtccgtcacgtggttggatttacggattgtcagcgtggagccaccttccttgttcattcagtgaccgcagatgcggtcgtgttccagttccttcttcatttccccgatcaggttcagcagatccagattggtcagggtcgcatctccgagtgcttccctgcattggcttaataaatctttcttactcattgtcttctatagattaatattggttacttgttttcctgccgcttgctttcggcaagttgtttgatagccagctcgatgtttccgcccagcttttccgtaaggcggataagttccagtttctcagtctcttcggtggtgtagcaaaggtactcttcagccgaaacttctgtcgcatataccgcactttgcgtaccgccaagcccaatccagacctctttataaaggcggttcgccgcattggcaagattgatggaaagtatctggctgcgttccttgtccgtcaggccgagcaggttctgtatctggtcgaatttgttctgatacttccgctggtcaagcaatattttgcagtcgctgttgttgataatcgtctctttcacaacgggggaagagataatatcatccacttcctgcgtcactacaaccgcctctccgtaaaactttctgactgttttaaaaagataacggatgtagtttgccataccttccttggcgattgccttccaagcttcctcaattaatatcatcttgcggataccttgcaaacgtctcattttatttataaacgtctccatgataatgatggtgacaaccggaaagaggattggattatccttcacaacatccaactcaaatacaataaaccgtttgttcagtaaatccagttccttgtccgagttcagcagatacccgtattcaccgttcttataataaggttccagcacgttcagaaaaccgtccacatcaaagtccttctcccgcacgttcttgtctgccagtatcttgcggtagtccttccttacaaagtcatagaacgagttgaagttcggctttatcttccggttcttctttatcttttcgatatacaggctgaccgcattcgagagcgccacctcttccgaacgtcggggcggttcgtcctcccttttccaaagggtgagtatcagtgtcttgatgctgtcccgcttctcgatgtcataccggtaatcctccgtgaaaaacggattgaaagaaatcggatcattttccttgtatgtaaaataaatcccgtcatcccctccggtcttctgatgtatcaggtcacagagtcccttgtatgaattaccggtgtccaccagcaggatatgcgtcccttgttcccagtactgtctcacaagatggttggtaaagaaactctttccgctgcctgacgggccaagtatgaacttgtttctgttggtcaccaccccttttttcatgggcaaatccgatatgtcgaggaagacgggctttcccgtcagcctgtccaccatgcggatgccgaagggagagagcgagttccggtaacaggtttcggccgtgaagaagcagagcgcctgcccggtaaacgtgtaaaacgtctcttcggccggaaagtccgcttcatttcccggtatgcccgcccaatagagagccggaaggtcggtcgtgttatggtgcggggtacattccatcaatgccagtgcgcttcccacatcgttcttcaccctgcggagttcgttcccgttttccgcccatgcgatgatgttgcaatggcagcgcaccgactgcaatccattggtatgcgcttcattcaggtattcgtccagccactccttgttgatctggttgctgcggctgtaccgggaaagcgactgcatgttcttcgccatcttctcgaaacgggaaaggttttcgttactgtcgtctataaatatccactggttgtagatatggtcgcagggcagcatcacgcccacgggggcggcatagctcaaacggcagtccgagcggtctgtcgagaggcgttcgtatcgcccgtccgtcctcacttttcccggcagatagtcgaggtcggagagcgtgtgcaggcagagccgcttatctccgatgcgcatcccgtccggattcaattgcatgtcctgcaacatggtagttccgtctgccgagagcgtaaggtaccgttcgataatgcccggttcgttttccgttcccgtaatctcttccgtggtcagccgttccagcctgacaagcccgctgtcattgacgatactttcaaactgtcccaccgcttccatgaatcgctccaccgtttccttgtccctgatttccttcggcaccagaaaaccacggcagagcgtgttccagttgctttgctgccgggagcgctctttggtggtcttggtgaggaacaggtagcaggtgtggtgcaggtagggacgttcgttgaagtggcgttcaaaactgcgggagagaaagctgagttcgtcccggcggatgtccggctcgtatttctccgtgatgaaaatatcctgtttgtgcaggattgaatagttcggcaacaccttgattgccttcgctcatgtggcgtgcatcgcctcatattctgcggatgataccgaaaacacttccggcagtgtgacccggaaagcgaccgtgatgtcggcgtccttgctgacgatgcagccgtgttccaccgccatgatgggaaacttgctttccagtgtggatgcttttaatatacttctcataatttacgattgttgtttgttgatcagacgtgtgatacgttttcgtgagaggattctccggggatgctgccgggccgcgaacagcttcatcagcccgtggctgccgtatttacggttcagcgtaaaggtcagccatactagtaccgtagccgccgataccccgaaaccgatgcagattcactgtccgacgcccgccatatacatgatgacgaacatcacaaatacggcaagcaggccggcggcgaaaataaacaggtattgtgcccgaagccccttgaactcaacttcacggcccacccctttatttatttcaaaatcagccataagttattgtcttttttatgtttttagaggaagaacgacctcagaatggtggcggcgactatcagaaagatacaggctccgaaccacgaactggcagttttactcgtgtcggggtcgcccgaactgaacttctgatataccttgattccgccaacgaggccgattacagcaccgattgcataaatcagttttgtgccgggatcaaaatatccggtcacgagttgtgtcgcttcggtgatacctgcctgcccgtttccttgtgccattgccgcacttgctgccgcaacagcggccagcatcataatcaatcttttctttttcatttatctccgtgatttttaggtgattaaaaaaagccacggactgccccctttcactatccccataggcagcccgcagccgcttatggtttattgattcagggggtaagttccggccggaaatcagccggagtcataatatgccatttgcattgttacatgatttggtggtgaaacattcttgttaattctctcttgaaagcgggatgcgaatcatcccgaatcgtaatagccgtttgttctcattgtctttatcggtttatttcagatattccccacatttgaatcccttgcggggtgtatagtcttcaaaggaagaggatttgaacagccacatccggttcgcccatcgggcaaggtcacgctcgtaacgggtaggtgtccgttcatttccataatcccgaaaaggaattacaaagggagtgattcccaattccctaagtacgttcaaccggaacaagtcctgctcaacagtcgaattgaatcctatcagtacgtagcaggttatcttgtagggtttcacgtattttaccatctctttcaggcgttctgtcaaatcaagctgcggcaagtcccacgcaatatggatgttctgcttcatcttcagcctgttcagatgccaggcctgttcctcgtccataatcctcacgtccacaccgtgcagtttcacgggttgcccttttttcatcagataatctatcgccgaccttcactgcgggttggcaaagaaattattgtccagcacctcaatccatttccctttcgggttcagttccaccggctctacggcctgaatgtatccttccttctcacggacgaggcagaaagggcatttgcggatgcagcctcttgaaaagaactggagcgaaaaagggtattcggggtaaatggaatagtccatcatccggctgttttccacagcttcgggaagcctgcccggaatatcatatccggttccgccctttatcacttcccttgcatccagtagccggtaatcatagtcaggtgtgaaggtgaacaccttgcttgccagcaccttgtcataacgcctcgccggttccgctcattctacttgacaaccttttgccttgttgtaagccgaaaggcgcatcaatgcaaaattggggaagttatgtccgtccacatctaccagtcctatattcatacggataaaatttaatggtgaatagttcttgttaccttaccgggtgaatgccatgaacggcctgtcatcccgaatcataatagctttttgtcattgccgctgtcgttttatggataagttaatggaatgattgtctctctgggagttaatacgtttcccgtcataagagggaaaccgccgtttgtcaacttgaatcgaaatacgtcataaacatggatgatacgttttgttgttggttttctaccgaatctctctccttacaatgatacgggttatcaacccgtatcaaaataacctcttaccattgttacctccttttttaattggttagtcactgtccggagtagcctcattcaaatgttcggcttcatccagaaatttgctgatacggctgtcgctgccattgatactttccagtatcgaacgttcaatctgcgtatccttgatatgatggatcgcccttaaaagggacaatcgtttgtctgtcggaatatccttgccattgcagaggtcgataatcaggtcaatctcttccggcccgataccggatataccgcccggataatcttcacgggcacagttcaaatcttccagttcctcgttcagttcgtcggtatccacgtcgtcaccgttttcaatctgtcccttattatccttaagcctgccggaactgtcggcctcagaagcccgccactcttccacacgcttgtcccggaacaaatccgggatgcgctcaggcggcacttgtacagccttctgcggcactgtttcctcgtttctgtcagcaaaagtagaggcattttccttacctgcaatagccccggaaccggtggcgtttattggcggctgttggcgtgtaccatagctttttgtaacgacaaggctgtccgtttcaggccgtttttggggcagcttttccatgttcctgccttttgtcttttccttaacttcatccttttctttgcccttcatttccacttttacagttgggtggttcctttcctcagcttccggtactgccactgccggaacttctttcttttccgtttttcctttcgtacgcctgcgtcctttcttcggttcttcttttgccgggtcgaaccatccggcaatgctccgcagaccttttgccatccggcggcgcatcttcccgaaacatatctcgccgagttcgcccctgaacaggaacttgtccatgaacagataagcgaacagcagccagaacagaactattccggcttcatagtaacctgattgtatatccataacctaaaatattttgttataactcttttggagataggtcttcacctcatccgcatgtttttcgaaatgctctttcaatacattatctatatagttgcctaccgtcaactgccgtttaccggcaatccctacaataacggatattttctggtgcagttccttgtctatatataccccctgtctgccttcgcatttataaggtgtgaggaacttacggataaagtcggccaatgcggtgcgaattgttttcggtgacggtttatccgtagccaattccgaacagccgatatcatccgcaccggaaatatcccttactgttccattcacattgttatccgcttttcctttttcatcggataaagcggttgctctatttctgccactctctccggtaatggaaggggccggagatgaaagaggctccgaaggcccccctgccatcagactacgcagatacgcttcgtccaccggattctgtccgcctgttttctttgccatgactattcgtttttaagtattcccatgatttcatccatgaacatatcaaagccgcactctctggtgaaggccgcatcgggagcgaacagcgtactccggtaaacggggccgcccgtagaagacaagtctttagtgaagttactgcgcacgggaatacgtgtttggaggcagtccagccctaacagggagaacccctgctggtagatgtcatacaatgtagtgcgttctcttcgatccaccatgttccagaacagatacagccttttcagagaagacaagccggtctttatcaggcggtcattgatggtagtagcaaagttcagcgtactttccagcacgagacggtctgcctttatcggtacgaacagataatcgagcgcactgattgcggcgataaccccgtcgctacccatagttccgggcaggtcaaacagcaccacgtcataatgcgtatccgttttgtcttcaaatgcacttcagtccgccatgcagtctgccgggttactgccgataaccggataagccctcttgtccagccgttccgactgttcaacaagcagactctgataaacgggaacagtctttaccacttccatatcccgttttttctgtttgatgattgagtgctgcggatagtcacaatccaccacagctacattcagtcctttcacataatgcagtcacgatgccgcataaatggtgaatgttgatttacccacgccccctttctgggtagcgaacgaaacgaataatgttttctttctcttttccattgttacctaatttaagtgaataatttgatttattgatagtttagcggatagacgcctatccacttatccgttcattcatttcattatcagtttagctttatagctatatagctacttagctatgaagctatttatctatttagctacatacttacatagctatccaattatatagctatttatctattcagccatgtagccacatagctatccggttgtttatctaagtatttagctaatagtctatttacttctccatttatccgaatatccacttgcttgtctatacatctttatatatctatagacatataagcggatagataactttatgaacgcttatctgaaaacttatttaatcaaatgactatccagacaaaaagctattcggatagaaaaccgtccgcatagttatcttgataaccatctttttatctatccggataagtggctaaataactatccggctacaaataaacctcaaaaagagcagtcatgaagtatccccggttccaaagtcattcattggcgggtgttggcgtgatacgccatgatgcacggacagaaaaaactatctacctttgtcgccgggagagcgcagcccgttctcgaaaagagaacgtaaaacaaaccctttagacctttaatccggcccagccggattttaatatgcgtcagcatatagcgaggtgtactttcagcggttgaaaatatttctacccgctgaaagtctcgccccgaaaggtctttcggggatgtcagttctcctaagtcgaacttcctaaattattcatgttatgaaagatgaaacaagaatccgtagcgccgcagggcgcaaggtgctggcagacccacgcacgcaccgctattacctctgtctcaatgacgaggaagatgaaaagtttatctccatgttcgagcaatccggcatgaagaacaaggccgaatttatcttcgcccgcatcttcggctgagagttcaaggtagtgaagattgataaggaagcacaggaatattatgcccagctaaccgctttctatcaacagttccgccgtattggaaacaactacaaccaatgtgtaaagaccatccataccatttacggggagaagaaatcgcttgctttcctttataaactggccgaagaaacccgcaagctggaggaactctgcaaacagattatcgaactgacaaagcggttcgagaaggagtatctcactaaaaaggaataacatcatggtgccgaatattacatcaggtagttcattctatggagtgattgcctataataagataaaggtggacgacggtacggcaaaggtattgtgacatccaaaaattgcggctgacacttcggggaatgttccgattgaaaactgcgtgcaggctttcgagccttacatcgcactcaactcacacgtcaggaaaccggttatccatatctcattaaatccttccccgaaagacattctttcggaagaacaaatgacggtactggctcaggagtttatggaaaaattcggttacgggaaccagccttatatagtctggctgcacgaagacatcgaccgcaaacacatgcacatcgtttcggtacgtatcaacgagaaaggagaaaagatagaccacaaccgggaggccatccgggcacagaacatctgtcgggaaatggaagtgaagtacgggcttcatcccacgctcggagaacatggcgaaagggaactactatccctgcaaaaagtggattatccgaaaggtgacgtaaaagtacaggtaaagcataccgtccgtaccttgttggaatgctacaactgccattcgcttgccgaatacaatactcttttgaacttttataacgtaaccgtttatgaagtcaggggaaatgtggacgggaaggaataccacggcatcatgtatggagctttggatgataatggacagtcggtaggcaccccttttaaatccagcaagttcggcaaggctttcggttatgaagcactacaaaagaaatttgccgcttccactgaaaaggtgaagaaggacaacctcgcagaaaggacaaggcaggaaatcatcaaagccatgcaggacataggcacgaaagaggattttgcccgcaggctaaaagaggcggatatagaggtcgtttaccgtatcaatcccgaagaacgtttgtacggtatcacttttatagaccatacctgccggactgtattcaacggttcacgcctgggtaaagccttttctgccaatgtgttcaatgaactgttcaacaacccggatgcagaccgtgaacggctgataccgccaacccggcaggaagcatcccagcaggatggagatacggaacgagaggaaagacaagagagggaagaacggcaggaacagcagcaccgccggcagccggaaacttccgaaagtctgattaacacatccgcactgggtgccgttgatatattctctgtgcttatggaagacgaccatactcacgagtatattgacccgtcttttctctatggacgaaagaaaaagaagaaaaagcgcaggcgcagattataatataataatgtatagaacaaaagtctaatttcaaatttacgattatgcagaatgaagatgatttaagaggtcttgccaaagtcacggactttatgcgggccatcagttttttatttatggcaatacacatctattggttttgttacggctggctttacgaaatgggctgaacgctcggtatagtggacaggatactttccaacttccaacgcactaccgggctgttctcatccctgctttatacaaagctgttttgtgtcctcttcctcggtctgtcctgtatgggcaataaaggagtaaagaaacatgaaatcacatgaaggcaaatcatcattgcggccatagtgggcgcaatactgtttttctttaattggtggttactctccatcaatgcttcatcgggtgtttgtgcagtactttatactacaactttaaccggcggtttcttttctttgttggcatccggcttatggataagtcgtttgctcaaaggtaatctgttggaggatgttttcaaccgtgagaacgaatcgttcatgcaggaaaccaagttaatggaaaacgagtattccgttaatctgccaaccaagttctggtataggggcaaggaatggaaaggctggataaatgtagtgaatccttttagggccagcatgattttaggcacaccgggtagcggtaagtcgtatgccgtggtaaacaattatataaagcaggcaatcgagaagtcctatgcactctatatatacgactttaagtttgacgatttatcggttatagcttacaatcatctgatcaagtatcggcaccgctacaagataccgcccaagttctatgtgataaacttcgacaacccacgcaagagccatcgctgtaatccattggctccggaactgatgacggacatttcggatgcttacgaatccagctatacaatcatgcttaacttgaataaaagttgggtgcaaaagcagggggactttttcgtggaatctccgattgtattgtttacggccataatttggttcttaaaaatctatgaaggcggcaagttttgtacgttccctcatgcaatcgaattgcttaataaaaggtatgaagacgtctttactatcctgacaagttatcccgatttggagaattatcttagtccatttattgacgcatggaaaggtggagcgagtgagcagctccagggccagatagcaagtgctaaaatcccactgtccagactgataagtccccagttatattgggtaatgtccggcagtgactttacactggatattaataatccaaaagagccgaaagtattatgtgtgggtaacaacccggacagaatttccatttacggtgcggccttgggactttataactctcgtatcgtcaagctgataaacaagaagaaacaactgaaaagttgtgtgattattgatgagctaccaactatcttctttaaaggtctggataatctgattgccacggcacgaagcaataaagttgcggtcgtgttaggctttcaggatttcagccagttgaaacgcgactatggagacaaagaggccgctgtcatcatgtcaactgtgggcaatgttttcagcggtcaggtagtgggtgaaacggccaaaaccttgtcggaaagatttgggaaaatcctgcaaaaaagagagtccatgagcatcaaccgcaacgatacgtccacttccatcaacacgcaactggacagcctgatacctgcatccaaaatcagtacattgagtcagggaatgtttgtcggtgccgtagccgacaatttcggtgaaacgatagaacagaagatttttcatgcgcaaatagtagtggataatgatgcagtccaaaaggaaaccgcggcctaccagtccatacccgaaatcagcagctttctggacgagaacggcaatgatacaatggaagagcagatacaagcaaactaccggcaaatcaagcaggatattgtcgaactggtagagaacgaactgatccgtattgaaaatgacccggcactcaaacatctattgggaggtaatgaaggagtgcaggcttaatcctgaaacggcgttctaacaagatgtttcccacggcacattacggcaatcccggaagctacgtaggcttcacttccgcaaattgccgtaaagagccgttttaggaaaggacaatgtaactttaccctttgagaacatagcggtaattgttttaaatgtcacaatttgacactgtaaatcgaatcccttcattgttataatattgataataaagcaaataccctgtatgattatatcgaattcacgttaatgtagctaaataaattgcttggcaaataaattacattattaattattggagatgattaacaggaatttagtatctttgcacccaatgtagaacgataaattgtgattttcatgaagacaacgtcatattatataaaagcacggttttttccgacattacttaccgttattccattgttaatattggtcaatgtaataatagcacctgtttatcataatagcttaagtcaaatttttgacattctccccataataacaaatttggggctctctggagctttgatttttctgatggtgcaggtcaatcgactggtctcaaaagaagtttttcaacgtttttactttaaagatgaaattaatatgcctactactaatcatctgctttggtcaaactctaaaatagataaccaaaccaaagccatgattagagaaaaaatacaaactcattacagtataacgctaatggatgaagaaagtgaaaccttgaatgaattaacttgtagaaaacaagttgtaactgccgtttcacaaattagaaactctctgcgtgagaacaaattactattgcaacataatattgagtacggattttttagaaattttttaggagggagtttaattgctattgtcttttcaatagcgattctaatttatggtaatattcaacatgatacaacccttgtcacgacagggacattgttaacaataatatatttaacacctattttattgagtaagattcttattaatcgttatgggaactattactcaaaaatactatatgaacaatttttatcaatataactatggcaacaagtacaaaagtggtattttgggatgtccaacatggacatgcaacatatattaaatcacctaatgacagacatattgttgtggatttagggattggggattattcagaaaagaactcatgttttagtccattacagcatataagatatgaatacggcgtaactcaattaaattacgtcatcataactcatcctcatttagaccatatagatgatatattaaattttgatgcattaagcccccaaattttgctgagaccatatatttcaaaagaaatgttgatggcaggatgtcgagaccaagataaaccgaaattggaaaaatattgggaaattcataatagatataatcaacccattagtacaagtaatgatcctaataatcttgaaaattatggaggattaattatcaggagttttgtgccaaattatataggaacaaatcttaataattatagcatagttgttgttttagaatatgcagggattaaaattgttattccaggcgataatgagaaaagtagtcttgatgaattaatggaaagaaaagatttcaaggatgcagtttctaatgcatatatacttttagctccgcatcacggacgagaatcaggctataatagtgattttgtttcattggtaaacccaagtttaataattatttctgacgggaaatattgtgatacaagtgctaataaaagatattcgcaaaatagttcaggatgggaagtgtataaaaatggtacatcatccaatcggaaatgcctcacgactaattcagatggagaagtgtatgttgaatttggttatgataataatcaaaaacgctttctatcggtaaacatataaataattaaaattagacatcaagagagcctatgtactttccatatgtattcgcctcaaattcattttttaaaaaatcaacagagtaattgttgttggaaacatatatgtgaactattcttgttgtacagtgaaatgttatattaccagctaaattttgtgttattgtattataaccacagtaataattcaagtgtttgcttgggcattcgccaataattattatatctgggtctaacacttctaataaatcacatggaactttaccactatccctgccatgatgaggagcaaacaagatattcacttttgataagtttaaatcatcttgaatattttccataaattccgtttctaaatctcccatccaaagcattttaacaccgttgttcaaagaataagagataattggagatatattattgggacttcctccatctttggctatttccaaagcctctataaaatatggatttgtgcgtattggccaatgaatattaattcccgaagatcctcgttcttcatcacttttattcatccattttcgagaacatcctttctttatataaaaagctttgtccgaatccctcaattcgcaatacttcttgaaatcatcgctttcatcttcttttgtagcttcattctctacgcaataaaaatttactatagattttcgttggttgaaatactccaaacctttaatatgatcttcatctggatgggttgaaataaatcttgtgatgtttttatctgttgattttgaaattatttcatccataatagttttcttgttttcgtcagataagaagcagtcaataaccgtaaaattatcggaattatgttgtatataaaacatatctccatttccaacagaaagcgattttactatgctcataaataatattgtttctacattaatgtcgggcaaagatacacttttttaatgtattgaaaaataagagactgatttaaatagcatgactttgatataattcaaaataatctaatctgttcgtcattgataaattgtaagtcaatgacgggtttcttcctaaaaaacaatattctgcaattgcggtcaatgcgctaataatgaaattattaataaacgataccttgagtattaattgtgtgtaatatcttttagtttattattaaccgtcctatcagagcccttttccaaagaagacttatgaactggggattttcttcaatcatatatttatcttgttgtattgcaaattctttgccgaaagttcgcttatatcgaattcacgttatttataaattttgttgatgctataataattcataacgtcattcctcgccaattcccgccattcattttcatcagtcttaaaaacgtaatatcttatgaattaaacctctacattcgcaccgacgggctaaagtttacccggtattgattaattattgtatcacttaaattattgattttatggctaagaaaaagcaagagcaacaagaacagagtctggacgagcatgtaatggccatcctcgacaagcggacgaacaagaccgcagtcgtttccaagatgaacgagcaggacggcagtctcgaaatcgtgccacccgacaagaagaacagcggcagcttcctcaaactggaccgtacctcaccgctggaactcttcttcaccaatttcaagaaccagtacgacaatcccacgagtttcagttttttcctcgtcccacttgtccttttggaaaagacactgaatgccgtagtccagatccggaaaggggaagaccccggagtggaaggcaaaaagctggtggagaacagcgaactcaacgatgaaggacgcatcgccaaacttgcccgaaggtataagtttgacgagcatcagcttccatggaaagaactcggtgccttgggaattgacaagcaattgttgtttgacaaccattgcatgggcgaaatgctgaaaggaagaatcacctcaaaggcttttcctattactaaggaagtgaacggagagaagaaggatatgggggaagcctgtttcctctgcgtcaagggcgaggacggcaaggtgcaactgaaaactctaagcagactcgacaaaccgcaatatgacctgcctgcctataagggagtattcacggacgaggaaaaacagtcgctcaaagacaccgggactttgggggctgtcaaggagatgaaggatacccatacgggaacggtctgcaactgttatgtatcctttcatgaaccgagcaaccgcatcatcaccatgccggtggacgccatcaagatacccgattatatctacgggaaaagactggatgacaaacagaagcaaatcctcgcctcgggcggacagcttcccatcaacgacatacagcgtaaaaacgacacgctgctttccggcgtcgctttcgtcgatccgagaataatggacatcgcattcaagcaatccggggaacaactgaaggtcaacgacactatcatgggtgccaaaatcacaccggaacagaaaaagatgctccagaaccatgaaatggtgttcatcgagaatatgcgctacaaaggcaggctgttttccgatgatgtacgtttcagcaacaagagcaaccaactgctgataggacgtaacgcccgtgaatacaagcctgccattgacagcaagaagaacgacaagaacaaggaggtgagacagcaggcgccccgccatgtggcatccgtaaaggcgcagccgaaaaaaagcctgtccgtcatgtagtagaaaaattatccatgtttacatcagatatatacccggttttcttttatggcagccgggtatatgcttaaatatgcaattaacattttaaagcgatagcagatgattatacaagataaaaataccgtaaccggagaattgtcctattttgagatgactctccttctttatttaaaggaaagccatccgcatattgccggtgacaaagaacttgtccagatgcgggccgacgaggcggcaggcagctacgaacgtgccatacgtgacggcttatccgttacgcaggctttggaactggccgacaccgttctttatcaggacttgcgcttttccagattcgatacggttttcgaggtcgtgtcggagtgttttcccgaagtacggcccgaaaaatggactggtttctgcctgaaagtattgccgcccgcagaaacagtattcagcaaatatcccatagatgaccggtttgaatcatccccgtcctatcatacacttacgattgaacttacaggtttcatacaatcttatatagaacaatatggcatataacaaacggcaacatctggcggacaacatagccgcacttgaactgatattcatgcgtccggagttctgtctcacggaagagggacgcaaagttttgaacggttattcgggtttcggcggattgaagtgcatcctgaatccggcggaaaaagacgcggacgttgaaaaatgagcggcagacagggagctgtttccccaagtccgactgctgcatgaacttttgcgcgagtattccaaagacgaaaaagaatacagggcatacgtccaaagccttaaaaactcagttctcacagccttttatacaccggaaccggtggtaacggccatgcaggaatccttgcaggtaccgggaatccgtccggggcgttttcttgacccttctgccggaacgggcatgtttatcagcggcttaaagggtgttcccgaagtccattgcttcgagaaggacaagctcacgggaaaaatactctcagccctttatccggaaagcagagtggccatagacggtttccagtccatacagccctattataacaactacttcgatatggtttcgtccaatatcccgtttggaaataccagagtttatgaccgggattttgaccggagcgaagatgtcgtgcgtaaatcctcacttgccgccgtacacaactatttctttctcaaaggtatggacacgttgcacgaaggcggaatactggcctatattacgacttcgggcgtcatggactcgccacagaaccgtcccgtcagggaatggctggtgaaccatgccaatcttgtttcagccatccgtctgccggataacctgtttgttgatgcaggtacggaagtgagcagtgacctgatcgtattacagaagaatacccggaaatcggaactgaccgaaaaggaacggaactttattgaaacccgccttatatcaggcagcatcaatatcaacaacagctatgccgatttagaccatatcgtccatacttccgtatctatgggtaaaaacatgtacggacaaccggccatgaattttattcatgaaggaggcatcggtgccatttccgaacatctcaggcagttattggcgcaagatgtggagaaccatcttgaccggaaactttatgatgacaatctatcccgttcaaacggttccaccatcctcaaaacggagtttgaggcactgttaaatacagcagagacagaacggcaggaggtacgggaaaaaagtcccacacaaccctatgaccccatgcccaacctgtttgccgcctatgcggatgaagaggaagcggaggtacaagtagcggaaagcagaccttcaccaagccgggcaccgtcggcatcccgcaaaaagaaaggggaggaaccggaaatgttcaatctcttctcccaagagaacatgtacgatgaagccgccacgcaggaagacatgaccggggaacgggcggcagcggaagcaaaatggcaggagcgcagacaaaaattcgaggaagagcggaagaaagaaatggaaccacgaccgtttaccggagagacacgtcccgaatacaggaacggttccatcgtgaaatcgggtgagcaatacggatatttaagaggggtgggtactcccgaagtacaattccatccgcttaaactgacagtcacccaacaataccgggccgcctactatatcccgctccgtgaagcctaccacaatctctacaataaggaagccgaaacggaaacggaacagccggaactacgggaagaactggtcaggcggtatgacagtttttaccgtatgttcagggagttgaacggaaaagataacgccaaattcctgctgatggatgccggagggcgggaaatactttcgttggaacgttccgttaacggcaagatacagaaggcggatatattctctgttcccgtatcgttcaacgccaatgaagtgacacatgtggatacaccgcaggaagcgcttgcggcatccctgaacaagttcggggaggtcaatctggaatatatggaaaatctcagtgaaacaggcaggcaggaactgctcacacaactggacaaccgtatcttctacaatcccatgatgaagaattatgaaatcaaagaccgtttcatagcgggcaatgtagtggccaaagtcgaatggatagaaaactatctgaaagactatcccgatgacgacgcaagcaagaaatcattggaagccttgcggaaggccataccggaaccaatcagtttcgaactgcttgactttaacctgggagaacggtggatacccatgtccgtatatgaagagtttgccggttatctttttgagtcaaaagcccatatccactatacggaatccattgacgagttcagcgtaagtcttgaagaaacaaacgcaaacatcactgacaaatattatgtgaaaggggagaaaagaggctactacgggaacgacctgctgaaacatgcgctgcacaacacggtgcccgacataaccaagaccgtgcaggatgaggaaggcaatgacataaaggtacgtgatgccgaggccatccagcttgccgacgccaaaatcaatgagatacggtcggctttcacaagttggttgaacgagcagctgcctgaatttaaacggcaccttgcggatatgtacaaccgcaagttcaattgttatgtacgtcccgattatgacggttccctgcaaagtttcccgttccttgacctgaaagggctgggcataccgtccctgtacgacagccagaaaaatgccgtatggatgctgaagatgaacggcggcggtataatcgaccatcaggtaggtacgggcaaaacccttatcatgtgcatagccgcctttgagatgaaacgtctcggactggcgaacaagccgatgattatcggactcaaaagcaatgtgcatgacatagccgacacgttcaagagggcctatccgaatgccaaagtactttatccgggcaaggaggactttaccccggagaaacgtgtcggaatattccatgacatcaaaaataataactgggactgtatcatcctgacacacgaccagttcgggaaaataccccagtctcctgaaatacagcaggaaatatatacgcaggaaatagacagtatcgaagagagcctcgctgtattcgagcagcagggcaatgaagtgagcggctggataaagaaggggctggaaagaaggaaggagaaccttgaggccaaacttgaaaagctggaacaggatataaaagaccggacggatgacgtgatcgatttcagacaaatgggcattgaccacctgtacgtagatgagagccatgccttcaagaacttgatgttcaacacacgccatgcgagagtttccggtctgggcaaccccgaaggaagcatgaaggccatgaacatgcttttcgccatccgtaccatacaggagcgcacaggcagagatttgggagccactttcctgtccggtacgaccatttccaacagcctgacggaactctatctccttttcaaatatctccgtccgaaggaaatggagcggcaggggattacctgctttgacggctgggcggccgtctatgcaaagaaaagcacggactttgaattttcagtaaccaaccaggtcgtgcagaaagagcgtttccgctattttatcaaagtgccggaactcgccaatttctatgcggagataaccgattacaagacggccgaggacgtaggggttgacaggccggaactcaacgagcaactctatcacataccgcccactccccagcaggagattttcattcagaaactgataaagttcgctgaaaccggggatgcggcctatatagacagggagcctctgtccgaggcggaagaaaaggcacaaatgctgatcgccaccaactactcgaacaagatgtcgcttgacatgcggctgatagatcttgaatacggcgacaatccgggaaacaaggcgtcccattgcgcggccaagattgcggagtattattataaatatcttgaccagaagggaacacaatttgtcttttcagaccttagtacttataagcccgaccagtggaatatctacagcgagataaggcgcaagctcgtggaagaccataatatcccggaaaaacagataaagttcattcaggaggcaaacagtgacaatgcacgcaaggaactgttcaaggatatgaactccgggcgcatccgtttccttttcggctccacacagaagctgggaacaggtgtcaacgctcaggaacgcgccgtggccatccatcatctggacataccctgaaggccgtccgatctggagcaacgtaacggacgggcggtaagaaagggaaatattgtcgccaaacaatacgcaggcaataaagtggactgttacatctatgcggtggaaaagtctctggacagttacaagttcaacctgctgcaaaacaagcaggtgttcatcaaccagcttaaaagccgcaatctggccgcccgtaccattgacgaaggggcgatagacgaaaacggcggaggcaatttcagtgaatatgtggctatcctttcaggcaatgatgatttgttggaaaaggcaaaactggacaagaaactggcagtccttgaaagcgaaaggcaggcgtatcaccgtaataaaggaaatgcgaaaggaaagctgaatgaaaagaccgccggaatagagaagaactatatttttatcggacgctttaccaaagattgggagtacttcaataaagtggctccggtagatgcggaaaccgggcttcgtcccaatcccctgaaactggacggtgtggactcggacaatatcgagatacttggcaaccggcttgccgcaatcaaccagaaggcccgcacggaggacgattacatgaaaatcggaaccctgttcgatttccgtatccttgtccgtaccgaaaaaacttgtgacggagacacgcaagccttgcataacaaattcatggtcgagggactggacggtatcaaatatacctatcataacggctacatagccaaagaccccaaactggccgtaatgtatttcatcaatgcgctggaacgtattcccggcatgattgagaaacgggaaaaggaaaatgcggagttgtcaaaagatattccggtcttgcaggaaatagtggcagccacatggcccaaagagggagaaatcaaaaagttgggtgaagagcttgccacattgaaccggaagatacagcttacccttaaaccggtaggacggcatgaaaatgtagaaggcaaagaaccggtagcagaagaacagaaacttgtcagtggcagtgacgtgatcccggatttaccacggcaggctaaacatgtaccgtccatggaaatcgcaaacccggcaaaggagctgaaaaaaatatcttaatgtttcctgcggcacattgctgtaaccccggaagctccacaggctccacttccgcaggttacagcaaagagccgcttctcaggaaaggacaaaggcacggcgggcacccggataaatccgaccttgcccgccgtgcccttgtctgtcagccgtaaattacatcattcctcttcctcaaaggaaaggctttccacctgtttgttaattaccttccagtcaatcgaatctttcaggttgataatatccacaatcgaataatgctttgtcccgttctcttcttccgcaaaacgcagccgtccgctcaaacgctgtttctcaatttctgccggatcgagatttatcagttcgcagacttcatcgggcagcatagaaagcgccacgtcattttcctgacagatatgttgcaggacagccagcatgttcaacgacttcttataacttctcacgagcgcagcgaatgaaccgctttcaattttaatcttcttcataacgtttattttttagagtgttcttctttttccagcaacatagcacgcagcacatccgaacggcggtaatagatcttccccttgtcacggtggaagggcagtgaaccgtcattgcgacgtcttaaaagtgtcctgtccgacatcttggtaagcaggcgcacaccttttgaatccagtatctcgctgtccggcaaattatgtacggcaggagccaataacttttcaatgttggtaactttggcgagtatggcactaagcatgtgggttgtctgtccacccggtgcagttcttctgttattcataatgaccttatttttattgtttatggtgcaatattacggagatattataaggccattggttactcaaccgttgagcaaccgccaaaaaaagacagaaaacgccaatttgagacaaaaaaatagccggaagacactgttcccggctattctataaaaagtaggcatcaataagttatgccttaaatcattaatatattaataatcagatttatacaaaaataaatggcagtatattttgctatattctaaatattgcctacatttgtatatgagttatttgaaactatgcaaagcagtgtaacccgaagcaggacttccatcaccaaatcgttacctgcatcttttagactctctatatttgctttatcttcagagagttatatcaaaatacattgttttaacgcttgaaactaaaagtttcaaaggtcgaaactggtgattgatctatgtaaaccagtattatgataacgggattttaccgtataggtatatgcatccggggtggtccgattgtcgggccggatggaccacctatacctctgtttttatcaaaaacggcattgcggagaatctcatatataataccacccacatccaaacccagtgtgaacttatcgaaatggtagtaaggaatcataacgggaaccgtttcccaacgtccgctcatcgcgtcatagtatcgctgtactcccatttccatcccgaagcggtcggacatatcgacggacatcgtagctccgtagctatgggtactcattccgtaagaatttccgatgtcgtatgacccgaagaccttgaaggtgacatggtcggaaggatgataaaggaaggcgcccgaagtgctgaaagcctgtccggtgatatgggacatgttgaccttcagcgcattggcacggacttgtaactcgaattgctcattgaaaatatgctgataacctagtgaagcactgttgaaacgcccgatgcctgccatacttgtctggcttccggaaccgaacagtgctccatgatcgaattgatgcaataccccgcccgtgctgtaatcacctcggaagagtagggaaggattggtctgataaggtagggaaatatcccttttgagtgaaaagcggggtatatgctccaactgtccgggtgaatataaagaatatgtagtgctcttttctggaaacaagttaatgttggcctgttttagtacgtcgtccggcgttatggatgcaccgttacgaagtatgtgcgtactgtcgttgttttcttgcgcagagagtgattgcggaaccaaatacagcaaaagaaagattcccaaacgaattggaagctgtgatatgctaactttttgtctcatacgcatttgccctccttagtttttatgataggttatgtacaaaaataatgaaatcccatttgaaaagcaaataatgtgtaatgtttccttccatccgcaggcttttttaactcaaataagagcagataagattttttctgaataaattcccttttttcccttaaattcttctctctctcaggcaatattcgttgtatatttgttattatagatataagagtatcaactatttaatttggaaggaatatgaagaaaaaacttacgggtgttgcattggtgttagctgccgtctctttgatgggcatacagccggcggaagcatgtacgcgtgccgtatatctgggaccggacggaatggtggtcactggtcgcacgatggactggaaagaagacattatgtcaaatatctatgtgtttccacgtggaatgcagcgtgcgggacacaataaagaaaaaacagtaaactggacttccaaatatggaagcgtaatcgcaacaggctatgatataggtacttgtgacggaatgaatgaaaaagggctggtggcaagcctgcttttcctgccggaatctgtttattcacttcccggagatacccgtccggcaatgggaattagtatctggactcaatatgtacttgataattttgcaacagtacgtgaagcggtagatgaaatgaaaaaagagactttccgcattgacgctccccgtatgccgaacggtggaccggaatctactttgcacatggctattactgatgaaacgggtaacacggcagtgattgaatacctggatggcaaactcagtatccatgaggggaaagaatatcaggtgatgaccaattctccgcgttatgaattgcagttggctgtcaatgattactggaaagaagtgggcggattacagatgttgccgggaacgaaccgttcgagcgaccgttttgtgcgtgcctctttctacattcacgccattccgcagactgccgatgcaaagatagccgtccccagtgtgctgagtgtgatgcgcaatgtctccgttccgtttggtatcaatacaccggagaagcctcatatttcttctactcgctggcgttccgtttccgatcagaagaataaagtgtattactttgaatctactttaactccgaacctgttttggctggatttgaagaagattgattttagtccgaaggctggggtgaagaagttgtccctgaccaaaggagaaatttacgcaggagatgccgtgaaggatttgaaggatagtcaatcatttaccttccttttcgaaactccggtgatgtaattgttagttatgtggtaagatgtctttttttgaataaaaaggaacggtaggcaaaggatttatccgcttgtctaccgttcttcttttaatttcgtgtcctgcgtgcggctataggcagcctttatcttttcgcatattcctgatggaactcaatcactgcctctattcctttccggaatatgtccagcgagaagttttcgttgggtgaatggatcgcatccgattcaagtccgaagcccatcaatacggttttggttcctaatacctgttcgaatgtcgaaatgataggaatacttccgccacgacgtactgccagcggttttttgccgaaagctatctcaaaacctttttccgcagcctgataggcaggaagggaaatcgggcagacatatccctgtcctccgtgcattggggttacttttacctgtacggtgtcgggagccatttgtaagatataatctgcaaacatctgcgaaatcttgtgatgatcctgatgcgcaaccagtcggcaggaaactttcgcatacgctttcgagggaaggactgtcttggagccttcacctgtatatcctccccaaatgccgcatacatcgaaagacgggcggcaactgttgcgttccagtgtgctgtatcccttttctccgaagagttctttcactccgatggcttctttgtatttcttctcatcgaacggaatatgggcgatcatttcccgttctgcttgcggtacttcttctacgtcatcgtagaatccggggacggtgattcttccgtctttatctgttactttgctgattatttcgcaaagcacattgatcggattagctaccgcacctccgaagtgtcccgaatgcaggtcacggttcggtccggtcacttctatttcccagtaagccagtccgcgcagaccggtggtgagggatggaagttcggcacccagcatgctggtatccgaaaccaggataacgtctgctttcaacagctctttatgctcttcgcagaaggcttccaggctgggagagccgatttcctcttctccttcgaagataaacttgacgttatttttcagcagttcgttcttgacgagatattcgaaggctttgacctggataaaggattgtcctttgtcatcatccgctccgcgtgcccagatgtatccgtcccgtacttcgggttcgaagggctggcttttccacagttccagcggttcggcaggcattacgtcgtagtgggcgtagaccaatactgttttggcattcgggtcaacgatcttttgtgcgaaaacaatcgggttacccttggaaggcatcaccaatgcttcatccactccggcttcgagcagtagttgtgcccagcgttgggcgcaagccagcatatcgtcgtgatgttccggcagggcgctgatactgggaatacggatgaggctgaacaggtcctccataatcttcggttcgttcgctgcgatatatttttgaatttcgttcataatgaatagtttactggcggttatttagcctatgtgccaatagcctgacagatttttagtgcaggtattggcacatgggtagattgacatattgatacttattaaagctgcgttgtcttatccaacagataataatcaaggatggtcatggcagccattgcttctacgataggcacggcacgtggcagtacacaggcgtcatgacgtccgcgggctttcagtgtcgtatctacgccgtcgatgttcaccgtttcctgctccatcagcagggtagcaatcggtttgaatactacacggaagtaaatatcctgtccgttactgattcctccctgaatacctccggagtggttggtatgcgtttcaatccgtccgttgttgttgaagaatacgtcgttctgctcggagcctttcatcttcagtcccttgaatccttctccatattcgaaggctttggcggcattgatactgagcatggcgttgcccaaggcggcgtgcagtttgccgaacacgggttgccccaatccgataggacatcctttgatgacacaggtcagcgtacctccgatggtatcgccttcgccttttaccttatatataaggtctgccatttccttcgccttttcagggtccggacaacgtacatcgtttgtttcgatcaggtcgagatcatagtcggaataagtgccttccaatttgatggcaccgacttgcgatgtataagctgtgatactgattcctaactggcgaagggctaatttagccaatgcgccggctactacgcgtgaaatagtctcgcgggcagaagaacgtccgccgccgcgatgatcacggatgccgtacttcactttgtaggtgtaatccgcatgtgaagggcggtatacctctttcaggttattgtagtcattggaatgttgattctcgttccaaacgataaatccgataggacatccggttgatttgccttcgaagatgcctgaaagaaactccactttatccgcttccttgcgtggtgtggtgaggatggattgtcccggacggcgtcgatttagttcttgttgtacaaattcttcgtcgattgtgattccggaaggaaatccgtcaattactcccccaactccttttccatgagactcgccgaagctggtgagccgaaagatgttgccaaatgaattaaacatagttgtggcttttttaaaattactctatgcaaatataacaaagttttcgataagaaggttgtgaattcaaaatatcttcggaaaaggaagcaaattgaaccttttttcctctttttagtttataaatgacgattatttaataactaaacccgaaaattatgaaaaagaatctattgtatttgtgggcattgatatgctctgtctctcttttgacggcttgtagcagtgatgacgataatacggtcaatgatgaaacgactcctccggaagaagaggctgtggtgactgctcccgatgtggtgggaacgtattggggaaatctcgatatttcaatgctgcccgatggctccgaccaggaagttgtgattgccgacggacttccgaagtttattactttctctcaggtcagcgatacggaagtaaagatggaactgaaggaatttgagctgtttataaacggaaacatattaaagttcggcgatatcgtaatagacaagtgtgcggtgaaaaaggaaacggacgcttcgactttcaccggacagcaagaccttacttttcagggggatgccgctgctctgggtacctgtgccaccagtatagaaggaacagtgcaaaatggaaatgctacaatgaatattcaggtaaaagtacctgcattgaagcagaccgtgaaagttgctttctccggtgtgaagcaggtggaggaatccggtaaggattaatccgtctttggtcagctagaaagcatatccgaatccgatattcaagtagatcggatacatagcaaaagtaatggtctgaaagtcatttctgaagatatcattcaatccccaggtgaggtctgcatatatattgagatgtttgaatgctctccatccggctcctatttgcaggccccactgaaaatgtctcaggtcgtccgagaagtcataagtagcgattttaccatccgtaaattcgactttggggcctacggggtcgccttcacgcaggtatccttcatatacgtgccccgaaaattctcttgaaagcagatacgaaaaataaggtccggctttaatattccaacggttgctcaacttgtaagtagccattagaggaattgtcagtccggaagtgtggactttggttttgactcctcctgtccagacaccgctgattctttctcctccctgtccgaggatttccatattatagtttttgacggtggcttccgttgtcatggctttattctccagccgcagccctacaatgactccgagcttgttttgaacggcaaaccatttggttacttctcctccgatgctgatagccagcgttgggttgtagccgtcaatcgaacggatttcgacaggcagcgggagcggggctgtaccgccgatgctgaaccctgctttgatttcatattccagtccgtgaagagcggagcgaataagtgtttcgtttctgtcaacctgtgaatagccggggagggctatcaccagacaggcgagtaaactgaatatataggaatggattttcatcttcattgttattattaaatcattagttatttcattttagttgctctgttctgccttccatggctgctatcagatcattgttcgaatggaatcagtcttccgagcgatagattagttcgacttcatcaatcagcaatgtactcccgatagctccgttgaaatgatccccttccaggctggaagtgaatacgatagctacattatactttcctgccgttagcttctctttatcgatgtattttccggataacatatggaagggaagtttaaagtatgtccactcgtccgtttctttggcgtcatcgatgcgtgctattgaaaccaagttgggactggtgaaagcattcgttccgtcaagagtcggcactgactcactggtttcgtacatgatggcataaatatcgcatatatcccgtttgccactgacgggtttgccgccttctgtaaactgatctccggctttgtacttgtaatagcctgccagataagtaggtacatgtcggaaaggcagaccgaatttggtcgctttcagcggattgctcattgcatttcctacatcgaaagaaccgataaacaggtttccggctgcgataggcattcccatgatgctaccgaagaatccggtactgcgggttactaaggacaggcattttccggtttttccgtttgcaaactgaaaagtcggatagtcgtcggctgtcttgggaactccggtcattgcataacctgcgtttccgctggcccattccatcaccactttttctccttcccgttctacgaagatgtagtatttctgtccgccgagtgtatcctcaaaattataaatggtagcaagttccgtatcaataacggacacggtgtacttcttcttccaaaagccatcggcagccgtaacggtatattgctgaggcgaatggaaatctctagccgtcccgctgggaggatcgatagtggctcccggagtcaatgtaaattcgggtgcaagggatgaaatatctgttcccggtcctacaaatatattgatggaattattagtgataatcggactcgttgtcatgactactcccggcaatctgcaactgagtatgtctgcctctgcattgggagcttcttcacgaatgcaagaagaagagaaaatggctagcagcaaataaagaataccgtgttttgctttcatttttctactattctaactgttaaagttcggttcttggaagattttataacaatctgcaattttatttgttcactaatggatgtttgataaaaaagaattttctacttttgtggaaactaaagccttatagggtatgattgaatcggaaagaaaacagataatagacttgatcaaaaaagaggtgattccggcgataggatgtacggaacccattgcggtagcgctttgtgtggctaaagctgccgaaacgttaggagtgaaaccggaaaagattgaagtgttattgagtgccaatatattaaagaatgcaatgggagtcggtatccccggcacagatatggtcggacttcctatagctgtagccttgggagcgttgatcggccgatcggaatatcaactggaagtgttgagagactgcacaccggaggcagtagaacaaggcaaactgtttatcgcagagaagcgaatttgcatttctctcaaagaagatatcacggaaaaattgtacatcgaagtaatctgcaaagccggtagccaaaaagcgacagctgtgattgccggcggacatactacctttatctatatagctacggatgaaaaagtattgcttgacaagcaacagactgccaatgaagaggaagaagacacttcactggaactgaatctgcgcaaagtctatgattttgccctgacatcccctctggatgaaatccgttttattctcgatacggcacgtctgaacaaagcggccgccgaacaagcctttaaaggcaattacgggcactctttaggtaagatgctccgtggaacgtatgaacataaagtgatgggagacagcgtattctctcatatactatcttatacttccgccgcttgcgacgccagaatggctggtgcaatgattcccgtcatgagtaactccggcagcggcaatcagggtatatccgccacacttcccgttgtcgtatttgccgaagaaaatggtaaaaccgaagaggaactgatacgcgccttgatgttgagtcatctcactgtaatctatatcaaacaaagcctgggacgtctctctgccttgtgtggctgtgtagtagctgccacgggttccagttgcggaatcacctggctgatgggaggaaactataatcaggtagcctttgccgttcaaaacatgattgccaatctgacgggaatgatttgtgacggtgcaaaaccgagctgcgcactcaaagtaacaaccggagtctcaacagccgtattatctgccatgatggcaatggaggaccgttgtgtgacttctgtagaaggcattattgacgaagatgtcgatcagagcattcgtaacttgacaagaatcggctcgcaggccatgaacgaaacggataagatggtgcttgatatcatgacgcacaaaggaggatgttaacaggtaataagtaacaagtaataagtaataagtaacaagtaataggtaatagctggaataacggcataaaaaaagtattaagtattaacttccgcctatatccgcatggaattaatacttaatacttattacctattacttaaaattagtggcagtgtccgccttcgcaaccgcagtcatcgccacagtcgctgccgcagctgtcgcatccgcaaccgcaaccttcaccgctcatcatcttcaccagttcctgaatttcttcgttggtagcaggacggctttcgattacttcaccttcaaagatcaggtcagcgcctgccaatgggtggttaaggtcaactactactacatccggtttgatttctacgacgctggcgtttacgcgttgaccgtctccggtcatcaaaggtacaatgctgccttctgttacgcgttcgctgtcgaacttgccatctatttcaaagatatttttaggaagatcaaatacatgttgctcatcgtaggctccataagcttcatctgccggaatggtaaaatcgaatttatcacccttggaaagagctgttatctggttctcgaagctttcgagcgttgtgcctaatcctgaaatgaactgaaaaggatgttctgcatttgtttcttcgaacaattctttttcaccatcttccactgtatatagcttatatgcaacggtgatgtacttgttttctactgtttccatctgatatttatagtttctaattaataaatcccttatttagggtggacaaagatacgaataatttgcttgctaccgggggcatacggagtaaatttcagattattaagcgcttttgtcagaaatggacagtcattctctactaactgatagttgcaaattcaacctttaagtgataaaatttaggtttattaccgttcttttcttacgattattcgctttttagtgatttttttcttcgatttgtttggagataataaaaaagcccttacctttgcagcacgaaaataaagaaaagaagatatgaatatattacatacatctattaacctagcagttctgcatattattcgcgtcgtggtggtgccatcaagagcgtgagaaaggttttgtgtatgtattcgtaccataaaagatagaatttggagcctttctcactgatgtgagggaggctctttaattaaaagatagattgaaatgaaaaagcaattacgcagttcgtttagtacacaaggccgtcgcatggcgggagcccgcgcattatgggcagccaacggcatgaagaaaaatcagatggggaaacccattatcgctatcgtcaattcgtttacacaatttgttccgggacacgtgcacctgcatgaaatcgggcagttggtgaaggcggaaattgagaagctgggatgcttcgctgcggaatttaatacgattgctatcgatgacggtatcgctatgggacatgacggaatgctttactcgcttccttcccgtgatatcatagcggacagcgtagaatatatggtcaatgcgcacaaggcggatgcaatggtatgtatcagcaactgcgataagatcaccccgggaatgttgatggctgccatgcgcttgaatatccctaccgtattcgtatccggcggaccaatggaagccggagagtggaacggccagcatctggacttgatcgatgctatgattaaatcagcggacgacagcgtaagcgatcaggaagtagcgaatatcgaacagaatgcctgtcctacctgcggatgttgttccggaatgtttacggcaaactcgatgaactgtctgaatgaagctatcggcctggctcttccgggaaacggcacaatcgtggctacgcacgaaaatcgtacgaaactgtttgaagacgcagccaaactgattgtggaaaatgcaatgaaatattatgaagaaggtgacgaaagtgtacttccccgcagtatagctacccgtcaggcattcctcaatgccatgacgctggatattgcgatgggcggttctaccaatacggtgcttcacctgctggctgtggcacatgaggcaggagtcgatttcaagatggacgacatcgatatgctgtcacgcaaggccccctgcctgtgtaaagttgctccgaatactcaaaaatatcatattcaagacgttaaccgtgcgggtggcatcattgctatcctggcagagttggcaaaaggtggtctgattgatacttccgttctccgtgtggatggcatgtcgctggcggaagcgatcgatcaatattcgattaccagcccgaacgtaacagaaaaagcaatgagtaagtattcaagtgcggcgggaaatagattcaatctcgtacttggttctcagggagcttattataaggaattagataaagatcgtgcgaacggatgtatccgtgatctggagcacgcctatagcaaggacggaggcttggcggtactgaaaggaaatatcgctcaggacggttgcgtagtaaaaacggcgggtgtagacgaaagcatctggaagtttaccggacctgccaaagtattcgactcacaagaagcagcctgtgaaggcatcctcggaggccgagtcgtcagcggcgacgttgtcgtcatcacgcacgaaggtccgaagggcggtcctggtatgcaggaaatgctttacccgacttcttatatcaaatcccgtcacctcggcaaagaatgtgccttgattaccgacggacgtttcagtggtggaacttccggattgagtatcggacacgtttctcccgaagccgctgccggaggtaatataggaaaaatagtagatggagatatcatcgaaatcgacattcccgcccgaacgattaacgtgcgactaacagatgaagaactggctgcccgcccgatgactcccgtcacccgtgaccgttacgtgccgaagagcctgaaagcatacgccagcatggtaagctctgccgataagggagcagtgagattaatagactgatccacttcattatccattatgaatcatccattatccattaaagaactatgagtaaggacttaataacaggcgcagaggcaatgatgcgctctctggaacatcagggagtgactaccattttcggttatcccggcggttccatcatgcctacgttcgatgccctgtacgaccatcaaaatacattaaaccatatcttggttcgccatgaacagggagctgcccatgcggcacaaggctacgcccgtgtatcgggtaaagtcggtgtttgcttggtgacaagcggccccggagcaaccaatacgatcacaggtattgcagatgcaatgatagacagtacgcctatcgttgtcattgcaggacaggtgggaacaggctttcttggaacagacgcttttcaggaagtcgatctcgtaggtatcactcagccaatcgctaaatggagctatcagattcgccgtgccgaagacgtagcctgggcaatagcacgtgctttctacattgccagtagtggtcgtcccggtccggtggtactcgactttgccaagaatgcgcaggttgaaaaaacgaaatacgagccgacaaagcaggagtttatccgcagctatgttccggttcccgatacagacgaagaatcggtaaaggctgccgccgaactgatcaataacgccgaacgcccgcttgtcttggtaggacagggagtggaactgggaagcgctcaggaagaactgcgtacctttatcgaaaaggcggatatgcccgcaggttgtaccttgctcggactttccgcattgcctaccgaccatccgttgaataaaggaatgctgggtatgcacggaaatctgggaccgaatatcaatactaacaaatgtgatgtactgattgctgtcggtatgcgtttcgacgaccgtgtgaccggtaatctggctacttacgccaaacaagcgaaagtgatccattttgatattgatccggcggaagtaaataagaatgtaaaggtagacattgccgttttgggcgactgcaaaaagacgctggctgctgtgaccggactgctgaaaaagaaccggcacactgagtgggtcgatagtttcaaggaatatgaagcggtagaggaagaaaaagtcattcgtcccgaacttcatcctgcaacggattcactgagtatgggcgaagtggtgcgtgcggtaagcgaagcgacccgtcacgaagccatattggtgacagatgtaggtcagaatcagatgatctctgcccgctactttaaatataccaaggaacgtagtatcgttacttcgggcggactcggcacgatgggttttggccttccggcagctatcggagctactttcggccgtcccgaccgcatggtatgcgtatttatgggtgacggcggactgcaaatgaatattcaggagctgggtacgattatggaacagaaagctccggtgaagattatctgcctgaacaataattatctcggcaacgtgcgccaatggcaggccatgttctttaatcgccgttattcatttactccgatgctgaatccggattacatgaaaatcgcttccgcctacgatattccttccaaacgtgtcttttcacgggaggaattgaaagcggccatcgacgaaatgctctcgacagacgggccgttcctgctcgaagcctgtgtggtagaagaaggcaatgtcctcccgatgacccctccgggcggttcagtcaatcagatgttgctggaatgttaatccttaatttagaaagttatgagtgataagacattatatacgattatagttcattctgaaaatatagccggattgctgaatcaggtgaccgctgtatttacccgtcggcaaataaacatcgagagtttgaacgtttctgcttcttccattaaaggagtacataaatatacgatcacagcgtggactgataaggacactatcgaaaaggtggtgaagcagatcgaaaagaagattgatgtgattcaggcgcactattttacggaagacgagatttatttccatgagatagccttatataaggtatctactcctgcttttcaggagactccggaagcatctaaagtgatccgcagatataatgcccgcattgtagaggtgaatccggtattctctatcgttgagaagaacggcatgagtgaagagattacttccctttacgaagaacttcgggctttgaaatgcgttctgcaatttgtccgttcgggtcgtgtggctattactaccagctgtttcgaacgtgtgaatgagttcctggacggacaggaagcgaagtataagcaaagtaaaaaggaacaggagtaatgagtgaagaaaataaaatagggacttatcagtttgtggcagagccgttccacgtagattttaacggccgcctgacaatgggcgtgctgggaaatcatctgctgaattgcgcaggttttcatgccagcgaccgtggatttggtattgctacgctgaacgaggacaattacacatgggtgctttcccgtctggcgatcgagctggacgagatgccttaccaatacgagaagttctcggttcagacatgggtggagaatgtctatcgtctctttaccgaccgtaactttgctgtcattgacaaggatggaaagaagatcggctatgcccgttccgtatgggcgatgatcaatctgaatacccgtaagcctgccgatctgttggcattgcatggaggaggcatcgtcgattatatatgcgatgaaccctgcccgatagaaaagccttcgcgtatcaaggtgacaagcaatcagcctgttgcgacgctgacggcaaaatacagtgatatcgatattaacggacacgtaaacagtattcgttatatcgagcacatacttgacttgtttccgatagaactgtatcagacgaaacgtatccgccggtttgaaatggcgtatgtggctgaaagttatttcggagatgaactctctttcttctgtgatgaagcgaatgaaaacgagtttcatgtagaggtgaagaaaaacggcagcgaggtagtatgccgttccaaagtgatatttgaataatatagagtataaaatcaattaataacagatggcgcaagtcatcaaaacaaaaaaacaaaaaaaatggcacagttgaattttggcggaactgtagaaaatgtagttatccgtgatgaatttccattggaaaaagctcgtgaagtattgaaaaatgaaacaatcgctgtaatcggttatggcgtacaaggtcccggacaggctctgaaccttcgtgataacggtttcaatgtaatcgttggtcaacgccagggaaagacatatgacaaagcggttgctgacggatgggttccgggtgaaactttgttcagtattgaagaagcttgcgaaaaaggtacgatcattatgtgcctgttgtctgatgcagcagtaatgtctgtatggcctactatcaagccttacctgactgcaggaaaagctctttatttctctcatggttttgctattacatggagtgaccgcacaggtgtagttcctcctgcagatatcgacgtaatcatggttgctcctaaaggttcgggtacatccttgcgtactatgttccttgaaggtcgcgggttgaactcttcatacgctatctatcaggatgcaacaggcaacgctatggacagaacaatcgcattgggtatcggtatcggttcaggttatttgttcgaaacaactttcatccgcgaagctacttccgacctgacaggcgaacgtggttcattgatgggagctatccagggtctgttgctggcacaatacgaagtgttacgtgaaaacggtcacactccttccgaagcattcaacgaaactgtagaagagctgactcagtcattgatgccgttgtttgcaaagaacggtatggactggatgtatgctaactgctctactacagctcaacgtggtgctctcgactggatgggccccttccacgatgctatcaaaccggtcgttgaaaagttgtatcacagtgtgaagactggtaacgaagcacagatttcaatcgactctaactccaaaccggattatcgtgagaaactggaagaagaactgaaagcattgcgcgaaagcgaaatgtggcagactgccgtgacagttcgtaaacttcgtccggaaaataattaatcagacttatactatataagtttttcaaaaggcgggaaaagcgtattttcccgccttttctatgtagataccggtcttttgagtaatagaaaaaggatgaaagtagaaaaaaagattaaaagatactgataatataggtgaaaaagagcatttatgattacctttacggcaacaaataaaacagaataggcaatgaagaaactttttacttacagaagatcgatacgtatgaagatgatttcttctttaatgaatagtatatcagaatgttacattaaaagatatttaagttattctctaccgaatggtagctgtaataccatttcaagtcctttttatatttcgtgttccattagtgattcgttgatatgatgcagaattttattctgtagcaggaaaaagtatgcgttaaattgaatttaagacagagcttttggaacagaatttagtgggaaaataacattgtttgttttgtttgtaaatgggagtcctctttcgtgagaaagggggcttctttttttatcccgatgattcaggaggataccgcttcctgccggatatactgtatcagtttccggtagaacgcatgcttggtaagagtggttgcatctcccaaaatcacaagtttcatccgggcgcgggtaatggctacgttcattcgtcttaaatcattcagaaaaccgatctgtccgtcctcgttcgcccggacgaggctgataaagacgacatcccgttcctgtccctgaaagccgtctaccgtgttgaccgtgatgaggctgcggaaagggcggagaaaactgcttcctctgattttacttctcaggtattgcacttgcgccttgtagggcgaaatcagaccaaagtcgatgctctcgtccaggatgcgtgctttgccgatccggctgatataggcttccagttcttgcagtaacaagttggcttcctgcttgttgatgcgcccgaagctctcgcctacaaactcttcgtggaagtccatttccgaggtatctatccagttcatgggagtgtcgaagtcaaggataccccggttgcgcacttccggtgcggcttccagttccccgttgtagaaccattcggagggaaagcgcatgattgcctcgtgcatccggtattgcactttgagcagcgagacggcagaaggtttttgctgcacgactttttccattaaagtatggtccagtccgccacgggcggcttcgatacatttgattgtaggagggagctggcaatggtcgccggcaagaatcacacggtcggcctttcggatggcgatccaacaggcggcttcgagtgcctgggcggcttcatcgataaataaggtggggaaacgccttccgttgagcaaacggtgattgctgctgaccagcgtagaagcaatcacacgggcactgtcgaaaagatcggcgttgatcaggatttccagttcggtggcacggtcgcggaggcggctcatccggctgcgtattccttccctttcggagtaacttccccgacgcatccggctgcccatttcacggattgattttcggattccccaaagttcggggtagctcggatgattctcaaagcggcgttcgtaggtgaaagagagcattttatcattaacacgcgtaggattaccaatgcggagcacaggaacaccccggtccaccagtttctcacaaatccagtccacggccgtattactttgggcgcagaccagcacctgcggttcgcggtgaagcgtttcgtaaatggcttccacaagcgtggtagtctttccggttcccggagggccgtgtacgatggcgacatcgcgtgtgcataacactttgtttacggctgtctcctgcgtgctgttcagccacgggaaacggacgggatacaattcgcggaatcccggcttttgtgttcccagcaaggtgtcccggagttcggcaaggcggttgcctttggcgcggatcgtgtcttctagcgcttcgaacatggcacgataggacgtttcatcgaaataaagttgtacacccagcacctcttccgtttgcagttccagcaatgcgcctgcactgggaagcacgaccaccatccgttcatcgtccgcataactcaccgttgcaatgaaattcatataattcactttcccgtcaaatgactgacggaaaaagcagacgggacgaccgaattcgaaggaatgctcgatttctttattttcggtgcgtgtaatatctattacaagttgatttagagaattatagtaacttcgaccgggagaggcgggataccagcacagaccacgtttcactttgcgggcgacacccattgtttcagtctgccgcttgaattcctccttttcgtgttcatactccatgcgtagcaggagttgctgttgctgaaggtcgatgattggacttttcggatgattattcataatagatgcaaaggtagtaaatcttcctcctgagacgaaaatatatttcattttgttaaacattcctcgaacgccgttcgttatttttatagatagactaaaaaaaataaaagcaatatggtgtatgatttgactatgttagaggctttttattctgcttataaaggaaaagtggaacacgtgcgggctgttttgaaacgccctttgacgttagccgagaagattctgtatgcccacctgttcaatgagggcgatgtgaaaaactacaaacggggtgaagactacgtaaatttccgtcccgaccgcgtcgctatgcaggacgcgactgctcagatggcattgcttcaattcatgaatgcaggaaaagaaaaagtggctgttccctccaccgtgcactgtgaccacttgatacaagcgtacaaaggagcaaaggaggacattgctacggcaaccaaaacaaacgaagaagtttacgactttttgcgcgatgtatcctctcgttacggcatcggcttctggaagccgggcgccggaatcattcaccaggtagtgctcgaaaattacgctttccccggtggaatgatggtaggcaccgactctcacactccgaatgctggaggattgggcatggtggccatcggtgtcggcggtgcggatgccgtagacgtgatgacaggtatggaatgggaactgaaaatgccaaggattatcggtgtccgcctgaccggaaaattgagcggctggacttccccgaaagatgtcatcctgaaacttgcagggattctgaccgtaaaaggaggaacgaactccatcatcgaatatttcggaccgggaacggcttccctgtcggctaccggcaaagcgaccatttgcaatatgggggcggaagtaggagctaccacttcgcttttcccgttcgacgggcgcatggctacttatctgagagccaccggcagagatcgtatcgtggaactggcggaagccgtggactgtgaactccgtgcggaccaacaggtgacggacgaaccggaaaagtactacgatcgtgttatcgacattgacttgtccacgctcgaaccttacatcaacggccctttcacaccggatgccgctacccctatctctgaatttgcagaaaaagtattactgaacggctatccgcgtaagatggaagtcgggctgatcggttcgtgtaccaactcttcttaccaagatctcagccgtgccgcatcccttgcaaggcaggtgaaggaaaagaatctgagtgtggcttccccgctgatcatcaatccgggttccgaacaaatccgcgctactgccgaaagagacggaatgatggatgacttcatgcagatcggagccgtgatcatggcaaatgcctgcggcccttgcatcggtcagtggaaacgtcatacggacgacccgacgcggaagaactcgatcgttacctccttcaaccgtaactttgccaaacgtgcggacggcaatccgaacacatacgcctttgttgcttctcccgaactgacgatggcactgactattgccggtgatctttgcttcaatccgctgaaagacagactgatgaatcatgatggcgaaaaagtgaaactggccgaaccggaaggcgaagaactccccttgagaggatttacctccggtaatgaaggctatatcgcccccggcgggacgaaaacagcgatcaacgtcaacccggcttcccaacgcctgcaactgctgactcctttccccgcttgggacggacaagatatactcaatatgcccctgctgattaaggcgcagggcaaatgtactaccgaccatatttcgatggcgggaccgtggctgcgttttcgcggacatttggagaatatttcggataatatgctgatgggagccgtgaatgctttcaatggcgaaacgaacaacgtgtggaaccgttcgacaaacacctacggaaccgtttcgggcacggccaaaatgtataaatccgaaggaatcccctccattgtcgtggctgaagaaaattacggagaaggctccagtcgcgagcacgcggcaatggaaccccgtttcctgaatgtgcgtgtaattctcgccaagagcttcgcccgtatccacgaaacgaatctgaaaaagcaaggcatgcttgcccttacttttgcggacaaagcggattatgacaagatacaggagcacgacctcctttcagtcatcggcttgcccgactttgctccgggacggaatctgaccgtcgttctccatcacgaagacggaacgaaagagagttttgaagcgcaacatacatacaacgaacagcagattgcctggttccgtgccggctctgccttgaatgccagataattaaaatgatagaaatgaacaaaataaccatgcaaaaagatggtacgctatcggtgcccgatgtgcctgtcgtaccttatattaccggagacggagtaggagcggaagtgactccgtcaatgcaagccgttgtgaacgcggctgttcagaaagcatacggcggcaaacgtcggattgaatggaaagaagtgctggcgggcgaacgcgctttcaacgagacaggctcttggctgccggatgaaacgatgaaggctttccaagaatatctgatcggcatcaaggggccgctgacgacccctgtcggcggtggaatccgttctttgaacgtggctttgcgccaaactctggatttatatgtttgtctgcgtccggttcgttggtatcaaggcgttcattctccggtgaaagcaccggaaaaagtgaacatgtgcgtgttccgtgaaaatacggaggatatatatgcaggaatcgagtgggaggcaggtactcccgaagccgagaagttctatcaattcctgaaaaacgagatgggagtgacgaaagtccgcttccccgagacctcttcttttggagtgaaacctgtttcccgtgagggcacggaacgtcttgtgcgggctgcctgccagtatgcgctcgaccatcatctgccttccgtgacactggtgcacaaaggaaacatcatgaagttcaccgaaggaggcttcaagaaatggggctatgagctggcgcaacgtgagtttggcgacgcgctggcagacggccggctggtgataaaggactgcatcgccgatgctttcctgcaaaatacattactgattcccgaagagtattccgtgattgccacgctgaacctgaacggagactatgtttccgaccagttggcggcaatggtaggcggcatcggcattgctccgggagcaaatattaactacaagacggggcacgccatttttgaagcgactcatggaaccgcccccaacattgccggaaaggatgtcgtgaatccttgttctatcattctttcggcggtgatgatgcttgaatatctgggatggaaagaagcggccgcgcttatcgaaaaggcgttggaacagagtttcctcgatgcccgtgccacgcacgatctggctcgctttatgccgggaggtacatccctgtctaccaccgctttcacacgcgaaattgtggaaagaatcgaaaagtaaatgtaacgattaaaaacgaagtattatgaagaaagagtatttgatttacaagctctccgaggagatgaaagaggcaacccggattgacaatgaattgttccccaagtttgacgtgaagcgtggactgcgtaatgaagacggcaccggtgtattggtaggtctgacaaagattggtaatgtggtaggttacgaacgtatccccggcggcggtctgaagccaattccgggaaaattgttctatcggggctacgatgtggaagacatttcccacgccatcatcaaggaaaaacgtttcggcttcgaagaagtggcttatctgctgctttccggtcgcctgccggacaaggaagaactggcttctttccgcgaactgatcaatgacaatatggcgctcgaacagaagacgaaaatgaatattatcgagctggagggaaataatatcatgaatattctttcgcgcagcgtactcgaaatgtaccgtttcgatcccgatgccgacgatacttcccgcgataatctgatgcgccagagtatcgatcttatctccaagtttccgaccatcattgcgtatgcttataatatgctccgccatgctacattcggccgttccctgcacatccgtcatccgcaggagaaactctctattgccgagaatttcctctatatgctcaaaaaagattatacggaactggatgctcgtacgctcgacttgctattgattttgcaggcagaacacggcggtggtaacaactcgactttcacggttcgtgtgacttcttccaccggaacagatacatattcggccatcgccgcaggtatcggttcgttgaaaggcccgcttcacggaggcgcgaatatccaggtggccgatatgttccatcacttgcaggagaacatcaaggactggaagagcgtggacgagatagatacctatttcacacggatgctgaataaggaagtgtataataagaccggattgatttacggtatcggtcatgctgtttacacaatttctgatcctcgtgcgctgttgctgaaagaactggctcgtgaccttgcccgtgagaaaggaaaagaagaggagttcgctttcctcgaactgcttgaagagcgtgccatcgctactttcggacgtgtgaagaacaacggaaagacggtttccagcaatatcgacttctattcgggcttcgtatatgagatgattggtttgccgcaggagattttcactccgctgtttgccatggctcgtattgtcggctggtgtgcgcaccgcaatgaggaactgaacttcgaaggcaaacgcattatccgtccggcttataaaaatgttcttgatgatctggcttatatccccatcaagaaacgctgataagaacaaatccttttatgcaataataactaacctcagacgtacatctcggcaatccctgcatgtacgtctcggtaatccccagttgtacatcttggtagtacccggttgtacgtctggggtgacttgtttcaggaagaacgtccgatgttcatttaacatttaacactttgcggctgctgtatttttcatccgatggaggctaaggcatttatcgttggtagaaagggcacagcctggcaggtagaaacgcccttttaacgctacgttaaaagggcgtttctacaaccgatgaattatacattctatttctttggatatcagtgaactatgaactttccctttaccggaggagagattatggcaggtgacctgttgagaacgaacttgttattttaataattaccgttgattgaatctttgctgctattattgggataaggcataatgtctattaaatcaaaatacattaagcgtgtttttagatgcgttccggtttcaaagcctgtatattccacttcttgcgcttccgtagagaaaaggtatttgaaaccgtttttcagataatagttcagaggaatattttcattgtaagcgtcaacaattaaaaagcgacaccctgttttgtttcctgcatcaatgaaccatgatttaatgaaagtcatcagatcactgcctatgccctgatgcttgtattctttattgattccaagtctgccgattaatacacccggatagcggcgcatttgtttggcacggggaatggctttctgaactttcttttccctgctgttggggaggatgtttactctgatactatcgttagaaacagtgaaggcacatactatgtccgaaggctttttatctgaacgaaaacagtaactttttcctaatagttgtgcattatagagaggagcatcgttatgaaagaagtcgtctaagtcttggtgcccgcatgagaaagggtcacattctttaatcgtatactcatcaagtacggcaaaagtacatttctcaaaaagaaatcccatgttttataacattttagcctttttgagcacagcacgggcttccagcacatgtttgctgaagtcttgtttgttttgatttttataagccttgtccgctgccttaacgaagtgttccgcttcttttccttttaaggtcggtatggctttaatttccattgccattgctttttctttttatttagttcataaccaactgcaaagatagctgatttttaatgaataaacaaagaatgccggaagtctgttgtcatttgatttgttttttatttgagttatttttgtggccattcttttctttttttgttatttttgtgaatctcaaaagaaaatcaagatgagtataactgcctttaatctatttttgggcgtcatgagtctgatcgctctgattgttttcatcgccctctactttgtgaaagccggttacgggatatttcgcactgcctcctggggagtcgccatttccaacaagttggcgtggatactgatggaagcccccgtatttctggtcatgtgctggatgtggatgcactcggaacgtcgttttgatccggtcatactgacattctttatcttctttcagattcattattttcagcgcgccttcgtctttcccctgctactgaccggaaagagcaaaatgccgctggcaattatgtcgatgggaatcctgttcaatctattgaacggctatatgcagggcgaatggatattttatctctcacccgagggaatgtatcattccggctggttcacttccgcatggtttattgcgggcagtctgcttttctttgcaggtatgttgatgaactggcattcggactatatcatccgtcatttgcgcaaaccgggggatacccgtcattatctgccccaaaaagggatgtaccgctatgttacttccgccaattatctgggcgaaatcatcgaatgggcaggctgggcaatactgacctgttcactgtccggacttgtattcttctggtggacagtggccaatctcgtcccccgtgccaatgcaatctggcatcgctaccgtgaagaatttggctcggaagtaggcggacgcaaacgtgtatttccttttatctattgatttgaaataaattatctattgacataaaatagcgtactatggaatctaaacttttcacccctgtcactttcggtccattgacgctgcggaatcgtacgatccgctctgccgcttttgaaagcatgtgtcccggtaacgccccttcacaaatgctgctcgattaccaccgctcggtggctgcgggcggagtcgggatgacaactgtagcctatgcagccgtgacgcaaagcggactttctttcgaccgtcagttgtggctgcgtccggaaatcatttccggtttacgtgaagtgaccggagctatacacacggaaggtgcggcagcaggcatccagatagggcactgcggaaatatgtcccataaaaagatttgcggaaccactcccatttcggcctctaccggtttcaatctctattctcctacattcgtgcgtggcatgaagagagaagagttgccggagatggccagagcctacggacgggctgtccacttggcacgggaagccggcttcgacgccgtggaggtgcatgccggacacggatatctgatcagccagttcctgtctccctacaccaatcaccggaaagacgaatacggcggctcgctcgaaaatcggatgcgctttatggaaatggtgatgaacgaggtgatgacagcagcgggaagcgatatggcggtctttgtaaaaatgaatatgcgcgatggcttcaaaggcggcatggaaaccgatgaaaccttgcaagtggccaaacgcctgctggcattgggcgcgcacgcattggtactgagcggaggcttcgtcagcaaagccccgatgtacgtcatgcggggagcgatgccgattcgttcgatggcttactacatggactgctggtggctgaaatacggggttcggatgtttggaaagtggatgattccgaccgttcctttccgagaagcctatttcctggaggatgcactgaaatttcggacggcacttccggaagccccgttgatttatgtgggcggactggtgtcccgcaaaaagatagatgaagtattggatgccggcttcgatgccgtccagatggcacgtgcgttgctcaacgaaccggagtttgtcaaccggatgaggcgggaagagcaggcacgctgtaactgcgggcacagcaactactgcatcgggcgcatgtacactattgaaatggcctgccaccaacatttgaaagaaaagctgcctccctgcctgcaacgggagattgaaaaactggaaaagcaatgagtgaagagaaatgggcaatcatcaccggtgccgacggcggcatgggaacggaaataacccgtgccgtagccgaagccggttaccatattattatggcttgctatcgtccgtccaaagcggaaccgatacggcagcgtctagtgaacgagacaggaaacgcaaacctggaagtcatggcagtcgatctgtcttctatggcatcgacagcttcttttgccgatcggattgtggagcgtcatctccctgtttccctgctgatgaataacgctggaacgatggaaaccggacttcacatcaccgacgacggctttgaacgaacggtcagtgtgaactatctggggccgtacctgcttacccggaaactccttccggcattgacacgcggagcccgtattgtaaacatggtttcttgcacgtatgcgatcggacacctcgattttcccgatttcttccggcagggaagaaagggacgtttttggcgaatccctgtttacagcaatacaaaactggctttgatgctgtttacgatcgaactttcggaacgcctccgtgaaaaaggaatcactgtcaatgccgccgatcccggtattgtttctaccgacatcatcactatgcaccagtggtttgaccctctgacggatatctttttccgcccctttatccgcacgccgaagaaaggggcttccactgccgtcggcctcttgctggatgaggcagtggccggagtcagcggacagctttatgcaagcaatcgtaggaaagagttgtcggacaactacatttatcatgtgcagaaagaacagttgtgggaaataacggagcaattgctggcgcagtggttcacatgatttaatcatttgggtaatcgtacgtgcatctgatcgttattcatttgatgcagtgcaaatgatgaataaaaaaaaacgtgaaaaaacgaccattctttcttctgccggagaaggagaaaaagaaatcacttggaattctgtgatcaatccgaaaaaaacggttgttgccgtttgttccttttatacggatttgagccaaatgttagtcaatagtatcttaaatggggtgactaaaaagtcggtagtatctccattggagatactactgtttgattcattcgtttcattcatttttcattcggatagagcaaaacaaggggtcggactgcccggaatctgtggcatggatcatggaatggatgaattgaaataagaacggtgaacaattgaaaagctcaattcgtccaccgttctttatattgcctttataaaaataagcttctgttctgttggcagtctctattaaatagaaagttctttcaatacattgaccagatctctcttgaccggcttatcattcttgatagctttgctgaatggtacataaacgatttcatcgtgctcgatacctatcattacgttgcgctggtcttccatgatagcgtcgatggcagcggcacccaaacggcttgccaggatgcggtcgtgagctgtagggcttccaccgcgctgcaagtgtcctaagatcgtcacacgcacatcgtattgcgggtattcgtttttcacacgttccgcatagtgcatggcaccgcctgtcagttcgctttccgctaccagtacgatactgctattcttggatttgcggaatccgttcttgataaattcttccagttggtcgacttccgtactgaactccggaataatggctgcttcggctcccgaagcaatggcgccgttcagagcgaggaatccggcgtcacgtcccatcacctctacaaagaacagacgttcgtgtgaagtggcggtgtcacggattttatctactgcatccagaatggtgttcaatgcggtatcatatccgatagtggtatccgtgccgtaaaggtcgttgtcaatcgttcccggaagtccgatacatggaacatcgaattcctgtgcgaagattcgggcgccagtcagcgaaccgtcaccaccgatgatcaccaaagcatcaatgccttctcttttcatattatcataagccagctggcggccttccggtgtggtgaactccttacagcgggctgttttcaggatggttccacccagttggatgatattacttacgttctggctcttgaactctttgatttcgcctgtcaccagacctttgtatcctctatatataccttttacttgtagtccgttgtagatagctgcacgtgttactgcgcggatggccgcattcattcccggagcatcacctcccgaagtcaaaataccgatacatttaactgttcccataacaatctttcattaattagtttgacgtggcaaatgtacaacaaaaagttgaaagcagtgtttcataagttttttttcgtgtgtcgaaaccattaaaaatattcaaattgtctcttctatctttctttttaatcttttatcaatagctggatatggtcatgtattttttccatcagccatttgggagtggaagtcgctccgcatacgccgatggattctacattccggagtaaagaaggatcgatttctttctcattatcaattagatgtgagttggcgtttactttcaggcattcttcaaaaagcatctttccgttcgaactctttttcccgctgacgaagaaaatcagatcgtgcgttgccgcaaattccctgagattgggcatacggttagctacctgccggcagattgtatcgtaatattcgaaagtggcgtccggtgaaatgtggagtttgatgtattctacaatctcctgaaactcgtccagagactttgtggtctgcgagaaaaggcggatgcttttagtgaaatccagctttttggcttcttccgcactttcgatgacaatggcttgaccgccggtctgccctaccagtcccagcacttctgcatgaccgttcttgccgtagataacaatttgcttttcttcaaaatcttccttccggaactcttgtttgatgcgcttttgaagccgcagtacgaccggacaggttgcatcgatgatttcgatattattcttgtgggcgatctggtaagtctccggtggctctccgtgtgcgcgaagcaacactttggcattgcgcaattgtctgaattcatcacggttgatcgtaatcagtcccattgccttcagcctttctacctcccggctgttgtgtacaatatctcccaggcaatagagcgtttctccttttgccagttcttcttccgccttgtggatggctgtgaccacgccgaagcagaagccggaaccttcatctatctctactttaatcatacactcgatttctatcctctattcctttactactttcccgaattgttccgacagccattccttctgctgttcgatgctcagattggaattgtcgagcagcagagcgtcgtccgctttgcgcaatgggctcacttcacgatgctggtcgatgtaatcccgttgctttacgttctcaagaatttcctcgaaactgccttcctggccttttgctttcagttcgtcaaaacggcgttgggcgcgaatctccggtgtggccgtaacaaatattttcagttccgcatccgggaaaaccgtggttccgatgtcccgtccgtccatcacaatccctttttctttacccatggcctgttgctgtgctaccatcgcttcgcgtacaaaatcgagtgcgctgatagggctgactttggacgaaacccccattgtacggattttattctctacgttcatcccgttgaggtaggtgtccggacgtcccgtctccggattggggcggaaagtaatccggatatcccggattgcttctttcagcttctccgtatcaataacgtctccgttaaatatcccattttcaatactatataaggtgactgcgcgatacattgccccactatctatataaatgtatcctacttcgcgggcgagatctttggccattgtactttttccgcaggaggaaaagccgtcgattgcgattgttatctttttcatattatctgcttcttatatttgtccgccaaagatacgcttattttgaaaatcagccatagatttgactgtaaaagcaactgaatgagtatgaaagaattaaaaaagttaaaaagccggataaaaagatacgaagaaacggacggttatctgaaaatgtagtatatttgcccagagacacataggaagacacttttttttattaatcattatattaacaaaattatggaagttaaaaaatcacccaaggcagacctggaaggaaagaaatccacatggctgctgatcggttacgtggtggtattggcttttatgttcgtggcgttcgaatggacccagcgtgacgtgaaaatcgatacaagccaggctgtagctgatgttgtttttgaagaggaaattattcctattaccgaaacccctgaacaagcgactccaccaccacccgaggctccgaaggtggccgaattgctggaaattgtcgatgaccaggcagatattgaagaatcaactaccatccttaatgaggataacacaccgaaagtggaagtaaaatacgtaccggtacaagtagttgaggaagagccggaagaacagactatcttcgaagttgtagaaaacatgccggacttcccgggtggacaggcagcgttgatgcagtatctggctaaaaatatcaaatatccgactatcgcacaggaaaatggtactcaaggtcgtgttattgtacagttcgttgttaacaaagacggtagtatcgtagatgcaaaagtagtacgcagtgtagacccgtatctggataaagaagctctccgtgtgatcaacacgatgccgaaatggaaaccaggtatgcagcgtggtaaaccggttcgcgttaaatttacagttcctgtaatgttcagattgcagtaatttgtaacactcatacatttaagaggctgcgaatgcagcctctttttattcattaatctttgttttcatcatgtttacagcttctcaattacttgataaaataaacaaccacctatctgaaattcagataacccggactccggaaggactctacgaaccaatcgaatacatcctttctctgggaggaaagcggattcgtcctgtattgatgctgatggcatataacttgtataaggaagatgtttcatcaatttacgatcctgctaccggtatcgaagtttatcataatcacaccttgttgcatgatgatctgatggatcgttcggatatgcgcagaggaaagccgactgtgcataaggtctggaacgataacacagctattttgtcgggtgataccatgctgatactggctttccggtatgtagccggttgtgcgcccgagcatttgaaagaagtcattgatttgtttagtctgactgcgttggaaatttgtgaagggcagcagttggatatggaatttgagtcgcgcaacgatgtggcggaagacgaatatattgaaatgattcgtctgaaaacggctgtattgcttgccgcaagtctgaagatcggagcgattctggcaggagcgtctgctgttgatgcggagaatctttataattttggtatgcagataggggttgcattccagttacaggatgatttgctggatgtttatggtgatccggaagtgttcggaaagaaaatcggtggagacatcctttgcaataagaagacatatatgctgatcaaagcactggaacgtgcaaacggagaacagctggaagaactgaaccgctggctgaatgccgacaactgtcagtcggcagaaaagatagcggcagtgacggaaatctataatcagttgactatccgcagcgtttgtgaaaacaaaatgcgtgaatattatacgctggctatggagagccttgaagcagttgcggttgccgaagagaagaagaaagaacttaagaatttagtgaaattactgatgtatcgggaaatgtagtaaagttggtgggaaatgccttacagacgattgccaaatacggatcaagccagagtacgggcgctgaaagcagcggtcgagaagggtgacgtgtataatgtgcgggacttggctatctcactgaaaacattattcgaagcccgtaattttctgctgaagtttgaagctgcgcagatttactatacccaatgttatgacaaccagtcgagagccagtcgcaagcatcaggcgaatgtgcggatggcacggctgtatatatcccattttattcaagtgctcaacctcgcggtgcttcgcgatgaaatcaaaccggtgcataaagaactttatgatcttccggaagcgaatgtggtaccggatttattaagcgaagcagctttggtagagtgggggagaaaaatcattgaaggagagcagcggagaacctctcaagggggaatccccatttataacccgactattgcgcgcgtaaaagtgcattatgatatttttctggatagctacgaacgtcagaagagttaccagtccgccaccaaccggagtctggatgagctggcttcgatgcgtgaccgggcagatgaactgattctggatatctggaatcaggtggaagcgaagtttcaggaagtgaatcctaatgaagcccggttggcaaaatgtcgtgactatggactggtatattactaccgctccaacgaaaaagtaaaagaagaaagcgaattgtcatgttaatagatactcattcccatctttttttagaagaattttccgatgacctgccgcaggtgatggaacgtgcacgtcaggcaggtgtttcgcgtatttatatgcccaacattgacagtacgacgattgaacccatgctgtcggtttgcgcggattatccggatttctgttatccgatgatcggactgcatcctacctcggtgaacgagtcataccgtcaggaactgtcaatcgtccgggagcgtctggaagcacccaataactttgtagccattggcgaaattgggcttgatttgtattgggataaaacctttctgaacgaacaactgtacgtttttgagaaacagatagaatgggcgctcgaatataaattgcccatcgtggttcattcgcgggaggcattcgactatatatataaggtaatggagccctataaaaacactgctttgaccggtatttttcatagtttcaccggaaatgcggaagaagcggcccggttgcttgaatttggcggtttcatgttgggaatcaacggagtggtcacttttaaaaagtcctcactgccggataccttgctgacagtgcctttggagcggattgtgctcgaaacggattcaccgtatctgaccccggcccccaatcgggggaagaggaatgaaagtgcgaatgtgcatgatacgttcctgaaactggtagaaatttatcggaccaccccggagcacctttcacaagccacttccgaaaatgcgctaaaagtgttcggaatggtcaaataaggttccaaaggttttaaattatattaatttgcagtatttatttaagataaaaaagggataatgctttaggaaaagaaaaaaaaggatacatttgtagctgaaaatgcggaaaactcataaggagaggtgctcgagtggttgaagaggcacgcctggaaagcgtgtatacgccaaaagtgtatccggggttcgaatccccgtctctccgcagaacaaaagttgaaacgtgaagtaaatacaataaataataatcaattaattaatcttaaaaattagacacacaatgaaaaagttatttgcaattgttgctgtgattggggcctttacatttggctcaattcaacttgctcaggctcaagacgctcctgcagcagaacaaactgaacaacaagctgctcctgctgctgctcaagctgctccggccgctgctcctgctgcagaagaaggtggtattcacaaagaaatcaaagttaaattcatcgaaggtactgcatctttcatgagtttggttgctattgctttggttatcggtttggctttctgtatcgaacgtatcatctatttgagcttggctgaaatcaacacaaaaaaattcatggcatctatcgaagctgctttggaaaaaggtgatgttgaagctgctaaagacatcgcacgtaacaccagaggtcctgttgcttctatctactaccagggtttgatgagaatcgaccaaggtatcgatgtagttgagaagtcagtagtatcttacggtggtgtacaggctggttaccttgaaaaaggatgttcttggatcacactgtttatcgctatggctccgtcactcggattcttgggtactgtaatcggtatggtgcaggcatttgataagatccagcaggtaggtgatatctctccgacggttgttgcaggtggtatgaaagttgccttgattacaactattttcggtttgatcgttgctttgattcttcaggtattctacaactacgtacttgctaagattgaagctcttacaagcgaaatggaagactcttctatctctttgcttgacatggtaatcaaatatgatctgaaatacaaaaaataattcgaaatgagtaagttatcatataaagtatcgtattacgcactgtatgcgatgtttgccatcatcctcattgtcctggggcttttctacctgggtggtgatgctcaaggagcagatgtcattgcgggagtagatcctgaaatgtggcaaccggcaaacacaaatgccttactgatgctcatttatgggttatttggtttggctgttgctgctacagtagttgctgctgtattccaatttggagcagctttgaaagatagccctgcaaatgcaattaagtcattgcttggtttggttcttttggttgttgttttagtgattgcttgggctgcaggtgatggaacaccgatgaatatcccaggttatgacggtactgacaacgttcctttctggctgaaattaactgatatgttcctttattccatctacatcttgttgtttgtaacaatcgttgcaatcattgcaagtggcataaagaaaaaaatatcataatcaattgaggatactcaatttaataagtaattacaatggcaagaggaaaaagaaaagttcctgatattaactcaagttctacggcggatatcgctttcttgttgctgatcttcttcttgattacaacatcaatggatacggaccgtggtttggcaagacttttgcctccaccacccgaagatcaagatcaacagaatacagataagatcaaagaacgtaacattttgcaggtatacctgaataaggatgatgctttgatgtgcggtaatgattatatcggtgttgagcaactaagggaaaaagctaaagaatttattgctaatgccggcaatgcagagcacatgcctgaaaagacacagaagaatgtggagtttttcggtacgactctcgttaacgacaagcatgtaatttctttgcagaatgaccgtggatcttcttatcaggcatacatcagcgtgcagaacgaacttgttgctgcatacaatgaattgagagatgaactggcccttcagaaatggcaaagaccttatgcggaattgaacgacgaacagcaaaaagcaattcgtgaaatctatccgcagagaatttctgaggcagaacctaaaaaatacggagaaaaaaggaagtaagtaatgggaaaatttaataaaactggtaaacgtgaaatgccggcattgaatacttcttcgttgcctgaccttatctttactttgttgttcttctttatgattgtaacaacaatgcgcgaggtaacattaaaggtacagtttacacttccggtaggtactgaactcgaaaaactggagaagaaatcgctggtaacattcatttatgtgggtgaaccgactcaggaatatcgtgcgaaaatgggtactgaaagtcgtattcagctcaacgacagctatgctgaagttggcgaagtacaagacttcattttccaggaacgtgcaagtatgaatgagggtgaccaagctaagatgactgtgtctctgaaagtagaccaaaagactaaaatgggtattatcacagacgtgaagaatgctcttagaaaatcttacgctttgaagattaactattcttctactaaacgtggtgagaaataattagttaattgatatatagagaagggcgtccaagcaattggacgccctttctttttagcttctcttttagcttctctgtttattattcttcggcagaggcagactttatgtctgaacttcgtctgccggatatgatctaaaatctatccgaagtatgtttcttccgattcttttgtttctttattctttgactccgtaaacgattgtatggagtttatgtcttatcccttcataatccttttctgcatccaggttgccgtgtaccatgagatacataggcaggaaatcgtctccttctttatacggcggctggtagtagtctttttcccacagtgtaaatccgtggcgttggtaaaagttgatacggcgtttggccatctcctctaccgggcgttctacttccagtacaatggggcgtttcagaaactcacataaatgctctaatgtgcgttttccgtaacctccgttgcgcaatgccggattggtagcgaagtgttctacgtaatagaattcatcgaaatcccaatatgtgataaagccaatgggcaggtcatcgtcaaaaatgatattattatggaagttacctatccggtctgtatattcgcgaagatgttccagttcgcgatattcttcgggtggaaacgattcgacgagaagctcttccataaatttgtaatgttgtacgtccgatgtggtgatcggttgaaatctgatcatacggtttgggttttaagtttgacaatattgttttttgttgctatacccggtattgctataccaaatgttatactctatcgggtgttatattatatcagttatatgatactatgagatgttactatgtcaggagtcagacaggaattctaaaagaaaaagaattcctacatctgcctttaattaagggacatagaactcaataatccgctggatagcacgctggcataccgggcagaactcaggatattcgttcgttttcatgcgacaattgaatgccggacggtaaatacctttggctgagtaaccgccaccttcatatacacctaccggatagttttgatgttgtgctacaggtgtggggacaggcgtattcggtgcaagcatatcttcccatttcaaggcaaaatttacccgtgtactgatgttctgttcccacggctctacatccagcggatacgtgtccgtcattacatcgtcatcataaaaatactcatccgccaagcctccgaagctatgtccgaattcatggaccactacaggcttgaacatcggatgatgagcggtagtcagcgtatatgagttgtaaattcctccgcctccgtacacatccgtattggcaaggataataatatgctcataaggaatgccggccaaagcgttgtggatggccttcacccgacttgtagtcaggtaacggtccgagtaaaaagtatcgaaatgagaatgaacggccgtgtgtttccattgattttcgcggggaacactgactccgctgtcaatcgacggactggctacagccactacgttgaacttatttttcatcgaccggaacggttcgtgtgaaaacaggctttcgcaggctttctgtgcatcctgatagaataagtccatttccttttccgtgtagccttctgccaggatagcgacatctatgcactctttttcgttaccgctttgaagcatataccggtgtggagtgacgtgcgatgttccccgtttatgaatcaagatatcgtccggacggacaatgtgcttgaagctggtcatcacttccttgcggggagagaacagcacgatttctacctctgccggctgtttggggtagggaagcaagaatgtattttcgaagcctttggctgtctccttggcttcatcggtggacagccactcttgaaacagagaagaaaaggaagtcttgtagatgcactgtcgggtggcgagatctctgacgataatttgcccgttgccttcgagcggaagttcggacaaatgatgttcacgacctgcccaggagggaagctgagacagctcgtccagatagatcgcttgctgcttattgtttccggtgaagatataatctacccgcaacgtcttattctgaaaataatctgcaaagttttgcgcataacttcctgccgaaatcaggaaaaaaagaagaatactgcaaatttgtttcatataaatagtatatttatgttttttacaaaggtacaaactattgttgacttattcgatatttgcaaataaaagtaataaatcatagtatttgttgccgaaaaatagctaactttgcatgaaagattcattgattaaaacaatttgattcaaaaatgggacatcatcaattagatgctttagatgagcaaattctgaaattaatagcagggaacgcgcgtattccttttttggaagtagcaagagcgtgtaacgtttccggggcggctatccaccagcgcattcagaagttgactaatctgggaatattgaaaggatcggaatatgtgatcgatcctgagaagataggatatgaaacttgtgcttatattggtatatatctgaaagatccggaatcctttgattctgtaacgagagctttggaagccattccggaagtagtagagtgtcatttcactactggtaaatatgatatgtttatcaagatttacgctaagaacaatcaccatttactgagtatcatacatgataaattgcaacctttggggttggcgcgtacggagacattgatctctttccatgaagccataaagcggcagatgccgattatggtcgacattgaagacgaagattaatcgtacagaataaaatagcttactgtttcacgtaatctacaaaagcatacgggcagagatgtttctcatccacaggatgagcttctctgcttttttcgtgccattgagccggagatacttccggaaagaaggcatcggcttcgggagcaacgtcatttatttccgtcagacaaagttcgtcggcaagaggaagtgcctgctggtagacgcttgcgccacctaatatatagacgtgctcatcttccttgcagctttgcagggcgacttccagcgacgggaagacttccgcaccgggacataccgtatccggacgggtggataacacaacgtttctgcgattgggcaacgcacctttcggcagcgattcgaaggtttttcttcccattatgatggtgtttccggtagtcagtgccttgaagcgtttcaagtcgttgggcaaccagaaaagcagtttattctgaaagccgatcgccattcggcggtctacggcggcaataattgatattttactcatggttttataccgctactattccggcaatatgtggatgcgggtcgtagttcaccagttcgaagtcttcgaactggaagtcatagatactcttcacatccggattaattttcatttgaggcaatgcgcgtggttcgcggctaagctgcaatttgacctgatccaagtggttcagatagatatgggcatcgccaagtgtatggataaattcacccgctttcagtcctgtcacctgcgccatcatttgtagcagcagtgcatatgatgcgatattgaacgggactccgagaaatatatccgcgctgcgctggtaaagttgcaggctcagccgaccgtctgccacgtaaaactggaagaaggcatgacagggaggcaggttcatattctttaaatcggctacattccaggcgctgacaatgatacggcgggagtcgggattgtgcttgatcgtctctaccgcttcgctgatctggtcgatgaatccgccgtcgtagtcgggccacgaacgccactgatagccatagatatgccctaaatcaccgttctcgtccgcccattcgttccagatgcgtacaccgtgttcttgcagatatttcgcgttcgtatcaccttgcagaaaccagagtaactcgtagatgattgatttcagatgcagttttttggtggtcagacacgggaaaccctcgtcgaggttgaaacgcatctgatgtccgaacacactgatcgttccggttcctgtacggtcacttttctcagttccttcagttaatacgcgattgagtaaatctaaatattgtttcatagcgaataattttccaataagttggtgcgatgcaaaattacaaaaatggcgtgaataaattggcaaaccatccgacgaacttcttccacggtgagcgctttttccagaattccggtgttagctgcgtacagtgttctatatcgttctgaaacatttcgttcagttcgcctgtaatttccttgttaaagatgaaagcgttcgtctcgtagtcgtaccggaggctgcggctgttcaggtttgcggtgcctaccgtgcagaaaatatcgtcgaccatcatgattttggaatggtggaaaccgccattgtacatatagacagtggccccccttttcatcagtttgtgaagtttgtagagggcggcgtccggagtaaacggaatatcggaggcggaagaaaccataatcgtgacatccacacctcgttcgatggtgcgttgaagcgctttgttgatggaggatgtgggcacaaaatacgggttgacgatgtgcacgtttttctgtgccgaatagatcgacatggcataagcatgactgagcatacggctgtttttcttcggtgtgcggtctacgatggcgacgactacattggtgctgttcgactgctccttgtgcttggggaagtatgcttcgccgccaatattttgtttagtctccttgttccatatagtaagaaatatttcttgcaggtcattgacggcatcgccttctattctcatgtgcatatcacgccatgtgccgattttggggagtccgttgatgtagtagtcggcgatgttcattcctcccgtataggcgacttcgccgtcgatgacggctattttgcggtgatcacggtgtgccgcatgattgatgtagggaaaggtgaacgggtcgaacttgacaatctcgattccctgttcgcgtatttttttgagatgcctctttttgagcggtttattgttcgaccagttgccgaacgcatcgaacatggcccgtacttccacgccttcttttaccttttcggccagcaggtcgaacagcgcattggctatagagtcattgcggaaattgaaatattccagatgaatgtggtgtttggcgtcacggatggcgctgaataaatcaatgaatttttctcgtccgcttttcagtaacctgaccttgttattatcggatataggaatccctgactccgataagaaacgtaatacaagggagtcacttgtcagagctatggagtctctggaatgcgtcatcaaactgtcgatgacatctgcctgagcacggaataaagacagaaacagaaataaaagaaatatacgtagtttcaaaactcttttcgctattttagtttacaaagtaacaaagatacaacatctatgtttggagctatcgggagaggagggcaaatttattatactttaactgaagtttcgcaagttctttatattattgacaaacaatagtatctcaattctcctcctcccgggaggaggagtacccgtagggggaggtggtaggtgaaacaataaaaatacctataaaagaatatgaatgaatgcttttctcacctaccaccccgccctacgggcacccctcctcccaggaggaggggaattaagatagtttggataacgcaaaggtaacctgcgaaacttgaatactttaacagaaggaattaacaagaatctcttgatctggggaattatattcgttcgatacatctgaactgtctgctgtgttccctgccgttgtcacacttgtgccaacggcgtggcactgctgtgccagtgcggtgtcacaactgtgccaagcccttggcacagagtgtgacaagcattgttatgccattgatactactttccgtccggccatgaacagcaggacgaccgttgcaatgatgattgatttcggatcgaggctggttgcgccgtggttgatcatgccgatgagtacatctttcagtgtttcccatacggcttccagtccgcctagggtgacaaagagcgtggctcctactgtcattacgaatacagtccaaaggcgtgccaaccggttactgcggtcgggcaagtggtgcatgacgcggcggctgaatccgttgtcggctatttcccgcttgttttctgcgaagaaatctttcagaagtttatcattatctatttccgtcataaccgtttctttttaaatacgttgctaatttttcttttccacgcgacaggtggcttttcaccgtccctgccggtattcccgttattcctgcaatcttgtcgatgcttacatcttccatgtaaaacagcgtgatgcaggttcgttccacttccttcagcgatttgagtgactgataaacatccattgtctgccctatgttcgcttgttcggtgcagttgacggcgtctacttccctggtatccaggtctgccatctccttccggctgcgaatataatcataaaaaatattataagcaatacggtatagccatgtggagaaactcgacaagttacggaaagaggccagattggtatatgccttgatgaatgtatcctgtgccaagtcgtcactcaattcgctgtcaccgcaagtcagatgcaggaagaagcgtctgacaggcgactggtatttttgtaccaactggtcgaaggccctggtgttcttgaacaccacgacctgtgcgactagcgatatatcgttgagttggctcatttattttcttcgttcttctcttcgtcgttcctctccgagatgatgatgtcgttgcttctgatggcggtttctctgttcttgatttcctcgttggcatgttgcttgtagccgatcagccattgtcccagtcccataaacatgacgagcagtccgatagcgccaattccgaattcgccggtgatggcccagaggaatatgaagagcccgatgcctgtaaaggtgtttttgattccttgtgtacgttggtctgtcgatttgtgctcccgtatgaattcttccggaagaggctgaccggctgcgagagcctgttcggcaaggcgatagcgtgctttccggttcttgtagcggaagaagaagactacaaatatgatgaataccggcattccgaatatggcaatgatgctgatgatggctaccagaatacctcctccgactgcatctccgaaattattgaacgggaagtcatcgtcgtcagagctgatggtgaagctcgcttttccgtgagggccgcgcgaggagctactcactttgcccgtatctacacttgtcgtgtcggcgtcttcgtcatcgatgccgatcacagtgacggccgtgttgccgacatttaccttggcatccttgcctttccctttcgttacggtcacttttacgtttccggtagagtcgttcacaatagtcgtttgtttctgggcgtttgccagcgagaaaatggtcatcatgaccagtaaagcaattaaaatccgtttcatatattaattcttttatttgtttctttgtctgttagacgtagttcgtatgtcagaaagttgcaaagagacgaaatatttttgatatttgcaggaattaataaatgaaaaatgaatttacccgcttcttttatcgactatacccgtgccttactgggcaatgaagaatatgaaaaactggctgccgccttgcaacaggagcctcccgtcagcattcggatcaataaattgagaatgaaggaggaaggattaagctcgctgacagacagttctgcccgtttttccttcaacaaagttccttgggcatccgatggctactatcttgacgagcgtctgacttttacgttcgacccgttgtttcatgccggttgctactatgttcaggaggcttcgtccatgtttgtggagcaggtgctgcggcagtatgtcgagtctccggtggtgatgctcgatctttgtgcggcgcccggagggaaatctactcatgcgcgcagcgtgcttccggaagggagtctgctggtggcgaatgaagtaatccggaaccgttcacaggtgctggcggagaatctgacgaagtgggggcatccggatgtggtggttaccaacaacgatccggcggatttctcggcacttccgtcttttttcgatgtcattctgaccgatgtgccttgttcgggcgagggaatgtttcgtaaagaccccgtagccgtggaggaatggagtccggagaatgtagagatctgctggcagcgtcagcggcggattattgcggatatttggccctgtctgaaaccgggcggcatattaatatatagtacgtgtacctataatagcaaagaagatgaagagaacgtctgctggattcagcaggaattcggtgcggaactcttgcctctggaggtgcaggacgagtggaatataacggggaatttactcgatggagaggatgaatctcagggaagtttgtctgtctgccatttccttcctcataagacaaaaggcgaaggattctttttggcggcacttcgcaaaccggattcggaagatgaaccggcaacctattcattctcaaaagcaaagtcgtccaagaaaaaagataagaaaggcggagcggctgcttctcccgtttccaaagaacacatgaggatggcactgaactggctgaagcaggaaaatgtcgaaaaatacaccctgtctgcggaaggcgcgggcatcgtcgcatttccgcaacgatataccgatgaactggctgccatgaaacagtatctgaaagtgatacaggcaggcgttctgactggtgaagtgaaagggaaagatttgattcccgctcatgcgctggcgatgagcgctacgctcttgcggcaggatgcttttgatacggaagaggtgagctatgaacaggctatcgcttatttacgaaaagaggctattaccttgtcggaaacagcccctcgtggttatatcttgcttacttaccggaatattcctctcggatttgttaagaatatcggaaatcgtgccaataatctttatccgcaggagtggcgtatccgtagcgggtatttgccggaggagatacgtacgctgtaaagatcattcctgaaagaaacggagaaaggatagaatgcttagcttgatagcgcggctaatttatcatccataatttagggaagtattcccgtggggatttccttataattcagaatgaaaccgacctgtctgcctgttcccggttctgctccttccgttatttcttccagtgtgtaggccggaggcggggcaggtgatgtccgtgtttctccaatgggcggcgtgccccagttcagatgtaagttcttgtccagtcgatgaagcaggtacgtgtttccccatacggtgaaatggtgttccgtagccggtgaggcatccaatgaaaaggtaagagtcagcgtggctttgttgtcttctccttgtttcagtgcataagttcctttggtgatcagttcgagtcccgatgaaaaagcggttcgttgtccttgtttgaagaaataagcgtcacgggcagcgttgctgacaaggaaaatgtcgtcaacacccggcagtaggttttcgtccccattgggacgcagggatgacgagccgtgtatcagattgagatcttcgtagtagtccaccactttaatgggcagagtgagcgtttcctgtgtggcgttgtctgtcactttcagatacgtgcttccggtgagaattccggatatgtaaatcattcgtccggcgggaactccgctccagccgctttcgactccggcacttgcgatgcggggatttccgatttccagagagtagtctccgtttccactttcgattccgaggtagcgtcttcctcccatgggcacttcgtatttgctgtcgtaaaaccgcaggggggcatcggcatcgtctttacaggcactccataaaataagaatgcaaaacaagatgggggtgtaagagagggttttagttttcataatagtttagtgtttttttacagtccccaaatgtaatgcattctttttatttattcaagtttcgcaggttacttttgcgttatccaaactatcttaattcccctccctcccgggaggaggggtgcccgtagggcggggtggtaggtgagaaaagcattcattcgtattctattataggtatttttatgtttcacctaccaccaccccctacgggtactcctccttcccgaaggaggagaatggagatagaatcgactttttagtcacccccatttgggatactattgtttgtcaataatataaagaacttgcgaaacctcagttatttattcaataatcgggcgaaataaagcgggaatttatagcttgctcttataaattcgtgccattgccttctgatattgattctccagctggaggtaattctgatgactttgataaatgacggatacctcgacaaaatactcgatcatgctgatctgtccgcctgtcagagcctgtttcagcagtgcgaggtcttgttgcgcctgaaaagttttcctgtattcctccatagaggtgtgcagtgttttggcctcccgatagagctgtgccagttcggattccacttgcaggctggcattgtctttctgcaagtcgatgttcagcgcttgcgctttggctattttcaccttgttgcggttctcgaaaagcgggaaggagaatcccactaccactccgttgaaaggcgttccggtttcggtgttccggcggtagccgagttccagtttcggcagccattgcgacttgttgacggcgatctgcttgcgggcaacgaggctttcgttgttgaacgccattaacgtgcggtcggcggagagcacttccgatttcagtatctgatagtcggcagggaaaggcgtcgcaggatacgtgctttcttcgaacactacggggatatttccgtttaacgtgttcagttcctgcaacttattgcgcagtgccgtctcgttcagcgaagtctccgtcttgacattcagcagttccagattgattttattcgtttcgagggcgttcgcgtctccggtttggaggcgcttggcgtacattttggcaagttcttccgcgttgcgcagccgttcctccaagatgtgtttttgctggcgcagcatgataatgtccagacacacttctttggcgagcaacaatttctcttggcggaagacatccgcctgactgtcaaaagcacccgctttcagacgattcagcttgttgcgggtggcatacaggctcggaaagtcgaaactttgcgacaccacaagttcgccgatcgtttcgtttttatctttcgctccccaaaggtgggcgtatgataaagtcgggtccggcaggttattgtccgttttggcttccagcttttgcgaggtgatgagttgggcgtttgcctgcaactccttattgttggcttcgatattcttcaaaacctgttcgatgccgctttgggcctgcacttcgcccgtgagggcgagaagtgcgcagcttaccaaagagcctatgatgatgattcgtttcatactttttttatttgtttctatatacatagtagctatatttaactgataattatgcttgttccgccggtacgccgcacggagaatttgccccagcgctacgctggcggtgcatcatcagataaacaatcggaacgatgaaaccgttcaggaaagtagatgttaaaagtccgcccaaaatcactttggccatcgggctttgaatctcgttgcccggcagatcaccgcccagagccagcggtatcagtgccagcgcagaggagagagccgtcatcaggatcggattcagacggtcgagagaaccttgtatcacgctgtcgtacacgttcagtccctccacttgctgcaagtggttgtagtggctgatgagcaacataccgttacgggtcgcgataccgaacagcgaaatgaaaccgataattgccggaatgcttacttcgccggtcgtgatgacaagggcaaaaacgccgccgatcaatgccagaggcaggttcagcaagatcacgccggactccttgacactgcggaattcgtggtaaagcaacaggaaaataatgacaatactcatgaaagatgtcagcgccaatacacggctggcagcctgttcgctttcgaactgtccgccatactcgatgtggtagccttcgggcaactggatagtggtgtctacctgtttctgaatatcatttacaacactgcgcaggtcacggtcggcaacgttggcggagataacgattttccgttttacattttcgcggttgattgtgttcgggcccatggaggaaaccacttccgccacgtagttcagaggaactttgcgtccgtcgttggtgtcgaccatgaggttgcggattttctccatttcgtcgcgtgcgtcgtccttcactttgacgatgaggtcgaagctcttgccctgttcgtacacttgcgaaatcacttttcctgccagtgccacattcacgtattcggaaaattccggcagagtgatgccgaatttcgccagcatttcccgtttgggctgtatcttcagctgcgggcgttcgatttgttgctccacgttgaggtcggcaattcccggaatgtcgctgatagctcccttgatctggtttcccagcgagaacatcttgttcaggtcgtctccgaagagtttgatggcgatatttgccttcgtaccggacaacatcgcgtcgatacggtggctgatgggctgaccgatttcgatgtttgctccggtgatcgttccgagtctctcgcgcacttcggcgacgagttcgctgcgcgggcggtctttcagttcaaacggtgcctcgatttccgaaacgtttacgccgagcgcgtgttcatccagttcggcacgtcccgttttgcgggctacggtttgtatttcggggattgtcagcagcaattcttcggcacgatgtcccatcttgttgctttcttccagggatatacccggcagcgaactgatattgatggtaaacgagccttcattgaacgaaggaaggaagctgcgcccgagcgtaaagaatacccctaaggcgatcaggaaaaggacgatggtgctgccgagtgtcacccgtttgtgagccagtacccatgtcagcgccttttcgtaaatgcctttcatccagcgggcaaggaaggattctttcagttccttgttcgtcttgttgctgcccagcaggtaagagcagagcaccggagtcagcgtgagggcaacgaccgtagaagcgaacagcgccacgatgaaagcgatacccagcggtaccagcatacgtccttccattccacttaggaagaacagcggcacaaagctgacgacaatgatcagcgttgaattaagaatcggcattcgcacttccttcgaagcgttgaataccacttcgagcgtgctgaggcgttcggcttccgctttcagacggttctcccgcagtcgcttgtatacattttccacgtcgacaatggcatcgtcgaccagcgaaccgatggcaatcgccatacctcccagactcatcgtgttgatagtcagccccatgtagtgaagcgtgaggatggagacgagtagtgaaagcggcagcgtgacaagggaaatcagcgtagtgcgcacattggccaaaaacaggaaaagtacgatgacgacaaagattcctccttcaaaaagagactttttcacgttgccgatagagctttcgataaagcggctctggcggaaaatatccgtggagactttgacgtccgcaggcaaattcttctgtaaatcttgcagagaggcctccaacttgtccgtcagttccagcgtgctggtggcgggctgtttggtgacggtcatgagtacggcaggtttgccacgctccgaggctgtgcccagtttcggggctttgggacctactttcacgtcggcgatgtcttccagcgtcaccggaaagttgttcaccgttttcactaccgctttgccgagttcttccactttggtggtagagagcactccgcgtacgatatattcattgccaaattcgtaaagtacgccgccgttggcgttcaggttcatgtcttgggtgacggccatcacttctcccatcgatacgccgtagtgacgcatccgttcggggtccaactgaatctgatattccttgatgtctcctccgagcactgccacctgtgccacgcctccggtggagagcaggcgcgggcggatcgtccagtcggcaatcgtccgcagatcgagcatggaggtggagtcggcggtcagaccgacgatgagcatttcgcccaagatggacgattgggggccgagagtcggcttgcccacgttgacgggaagtgactcgctgactacggcgagcttttcgctgacgatctgacgggcgaggtatatatctgtgccccagtcgaattctacccagacaacggagaaaccgttggtcgaagaagaacggacacggcgcacgccggtagccccgtttacggctgtttcgacggggaaggtgacgagctgttccacttcctcggctgccataccgttggcttcggtcatgatgaccactgtcggggcgttcaggtcgggaaacacgtctacttccgtatgcatggcggtgtaagtccccgcgataagcaggaggatggccgcgcagagcacaaccagtcggttgtgcagggagtaatgtatgattttatttagcatgatatttcattgattaagtctggttcctcccggtttacttttgagaagtgccggacaggggataaacttgcgtaactataaatgagttctgtgtgtgccgcaagggaacttggatgcggcgctttgccgctagtgctcatgactgtgggcagggatggcgttgcttgcgcttgccaggcgaacttggtatgcgccttcggtcactacacggtctccaggtttgattccggtcaggatttgtacacttttgccattgtcggcgccgagggtcacttcctgtttcttgtagccttcttcatcgagttgcaggtagacgaagaagatgccttgctcttccgtcagggcggtgcggggcacggatatcacgttttccagttgggaggaaagcagataaacttcgacgaatgatcccggaatcacttctcctttattgtcaaattcgaaggtgacgggcacgtagaaagagttgtctccggaagttttcccgaaggaaagcagtctgccgctcagttcattcagttcgtagacctcattattataaggtgtccggaaattggcggaactgattgtgcggagatacgggtagtatttttccgatacttcggcacggaggaaaagccggcggttctgcgtcacgctgaccagtggctgaccgatggttacgtagtctccctcattgaccagaatacttttcacgtatccggcaatgggcgcggtgatattctgaccgatggccgagtggtttttggcgagcgcttcgtagctgatacgtgcgttttcgtagttctgctccgcctgtgcgaaatccttgtcggacacaatcttgttttggacgagcgacttcattcgttcgtattcctttttggatacttcgtaagcgattcgggcacgttgcacggggtcaccgtcggcgatgttgtgcgaagaaatagtcaccagcggagtgccgcgacctacgctcattccttccgtcaccttgccgcggaaagaaacgactccggccaccgtggctacggccaccgattcatcgccctgggcagcgagtacctgtccgcttgtcttgatcacttgctggaagggggccggtgtgatggcatttaccttcacaccggcagcgtcagctttcgctttcgggaggatgatttcgtcgctgtgctcgccggcgggttcgctggtggcagctttgccgtgatcgtgtcctccgctgcattcaccttcgtgtgaatggtcggctccttcggcttcgtggtcatgaccttccgcttcgtggtcatgtccttcgtgttcatcatgattgtgtgtgacggtctcgtggtcatgcccttcatgaccagtatttttactattgcaagagcccaggacgaataatcccatgactcctataaagataagtttcttcataaatgttgttttcctactaagttttactgtttttgtacgctacaaagatagagtaacgcagatgcaacttgcttgcatttacgtcattacgcaaaaacagagtagggaggggcccgaagggaggaggtacgaggtattttcgtaccgtgcagggattcacgatagatgtagtaatttttgactcgtctttcctgcggtcgtaataaatgttcgatgatcgtatccgtaaacagggtggcgacgaatacgtaattcggtccgctgtccgtgtgtacggaggggatgggagagtggaagcgggtcatgcattcgctgctgcaacatgaatcgcttgcggggtgatgatggtggttggggcattgctgctctaccggttggtcctgcttcatgcagatcatcccgttggggtggtggtgatggggaataacggcggctaccaacatgataatgttgataaagaatagcatcgttactatgaatcgtttcttccctttcatcctttgtttatatagagctttctaattttgtaaaacttccaatatctttttactttattatagagctccggttgttgctttattataaaacttcaattattctttttccgactctttacttttctctttttcttgctcctgcaagcgttcgagcaattctgtggcggagacgtaaatcacttttccatcgggcgtcccttgactgaggagttttccgtgacgggcatttctttccagtagccgttgttcggccagttggagcccgcgccgcagtttatcactcaattcttgcatttcattatttgacataactcttgatgcgattaaaaagttcaagttcgtatatccggtcctcaccttgctggcagccttcggctacaatcactcggggagaaacactgttatctgctaatagccaatagtctacacgtggcgcatatattcggaacaggttgtttatgcctgcctgatagcggcggtagattgtatcaatgggcacgttatgcccgccttcgttgacccgttgcaatacacggttgacagcaagttccggagagtttagccaaaaatagatcaggcttactttgtatccggcactctgtgctcttgtgatgagccgtgtgtacgagcgagtcgctaatgtcgtttcgatggagaaactggttcttgtagccaatagttcgtcaatacgtttcaacatcagacgtccggcttcgatagccatgctttccggattgaaaggcgatagtcctttggctatttcgtctgcattgacaaattctttgcacaataatatttcgggcagtacagtataagaagctgttgttttaccagctccgttgcatccgcttataatgtataactgcctcgtttcatccattttaaattatctgtttcagatattatgtgacaaatatacaaatactttttctttcacctaaagcagataatgtctttttattgtttattatttcttttccagttcctgcaacgaatccattttcttcttttcgaggaattcgtagatgccgcaaagatgctccgtcaccttcttattgccgaactcgtagaccttggtcaccagtccgtcaaggaagtcacggtcgtgcgaaacgacgatcagggtgccgtcgaaatccatcagcgcttgcttgaggatatctttggttttcatgtcgaggtggttggtcggctcgtccagaatcaggaggttgaccggttccagcaggagcttgatcattgccagacgggtacgttcgccacccgagagcactttcactttcttcatagactcttccggcccgccgaacatgaaggcgcccagcaagtcgcgtatcttgttgcggatttctccttttgccacgtcgtcaatcgtctggaaaaccgtgaggttttcgtccatcagcgaggcttgattctgcgcgaaatatccgatttgcacgttatgtcccagcgtcagcgtgccgtcatggtcgatttcgttcatgatacatttcaccagcgtcgatttaccttcaccgttcttgcctacgaaagccaccttgtcgccacgttcaattgtcaggttggcgttgcggaacacgacatgatcgccgtacgtctttccgacaccttccatcgtgacgggataactgcccgaacggggcgaaggcgggaatttcagccgcagtgccgaagtatcttcctcgtctacttccagcaattccagcttttccagcatcttgacacggctctgcacctgcaaagtcttcgagtacgtccccttgaagcgttcgatgaaggcttccgtttcggcgatgaacttctgttgctcgtcataagccttctgttgctgttcgcggcgttccttgcgcagttgcaggtattgggagtagtttactttatagtcgtagatgcgccccatcgttacttcaatggtgcgggtggtgatgttgtccacgaatttgcggtcgtggctgatcacgatgaccgctttgccgttattgatcagaaaatcttccagccattggatcgattcgatgtcgaggtggttggtcggttcgtcaagcaggagtacgtccggtttttgcagcagcagtttggcgagctcgatgcgcatgcgccagcctccgctgaagtcgctcgtctgacgttgaaaatcttcgcgtgtgaatccgagtccgagtaatgatttctctacatcctcttcgtaattggttgcgtcgatggagtaaaatttttcgctgagggcggacacttcctcgatcagtgccatgtaactgtcactttcgtaatccgtccgtgtttccagctccttgttcagtgcgtcgatccgtgcttccatctcgtgcagatgcgcgaacgcctgtgccgtttcggcaaacacggttctgccgtcttccgtcatcaaatgctgtgggagataggctactacgcaatccttgggggccgaaaccttgccacgggtaggctgtctgactcctgccagaatcttgagtaaggtactttttcccgctccgtttttccccatcagggcgatgcggtctttttcattaataacgaaagaaatatcactaaatagggtagtgccgctaaactctacggctagtccgtctatcgaaatcatacaattctttataatttgaggcgcaaagatagcgaaatatatcaatcttttttataacttgcgggctgaaaagcattattaactgaaatatgttgactaaaaagtaatttaaaagaataattttaaaaataatatagaaacgatatggaaggcggacaaacaaatgaattcagacctcttatcttagtggctgaggacgacgacagcaacttcaaactgatcaaagcaatcatcggaaagaaatgtgatatacagtgggccaagaatggcgaagaaatcgtggcactgttcaaggaatacggcaacgaggctaaagcgatcctgatggacatcaaaatgcctgtgatgaacggactggatgctacgaaaatcatccgcggagaaaacaaggaaatccctatcatcatgcagaccgcctacgctttcagctctgacaaggagaatgcgatgaacgcgggagcgagcgaagtgctggtgaaaccgatcacactgtcgattctgcgcaatacgctgacgaagtatttccccgaactggtctggtagaccgatctctttttttgtccggtagactgatcttttttgtttgttaaaccggtccttgctccggcaaacatgatctttatccggtaaaacggtatcgctgagtagaaaaacggtataacaattcgggtgttttttcctgttttgtatttgtgatattaacaaatagctgacggggataatatggattcttactatatgaaaatccacattatccccgtcagctgtgtccggacgtttctatgtcaatccggatattactgtatcaatccgggtgtattgtctggaatgcctctgcccgacactttcggcagaaggctgtaaaagtaaaataggcggacctcacggtcggcctatttctgttcgtttccgttaatttgttagagttcagaaacgactctatgtaaagtctctcctttgagagattttaagagcgatttttatcggcttccgcctgcccaccaaacgggttcggagtatacgtagtcaccgttgccgtaagcggctttcacttccggattggcagctgtgtcgctgtttccgtatgggtagcgcagcgggaatttgctggaattgtttgggttggtcagcgtgatgaagttttcgttcagtcccttcatacgacggaaatcattatacgtctccgtagcttcaccggaagcaccccacatggcaaggtacttctgaatcattgtttcctgcaatgggttggctgcatatttcgctttcactacgtcgtcgaaatactttccggcagacgtttccgtgattacttcgctggaattggtgttcaaaccgcttcccaactctttgatggcaatgcttatgctgttttccgcattcagcaagccggctactactgcttctttcagcgcgtcttccgcatcacggttcagacggcacagagcttctgctttcaggaacatcagttcgtgatagctcatcagcagagtcggtgcggttttggcgtaaacgaatgcggagataccgtatttggacgtactctgatccgggctgccgttgggagccggaacgaggctgggatcgttggctgctacctgcgaacgttttttgtcgacgatcggagtgaagaaagcacggttggcacgcggatcattgtaggccaacagcttggttccgaggcttgtactggctccgaatccggcacgagagttgtagaaaccgtagaacgggttgatgttgttagagtcgtagatgtcgaatgcagcctggtcgtcagccgaagtgaacgatttgcttacatagtccagcaccttttcataatcggccgatttgttgcttgagcggttgatcagtctcatggtgtagcgggctttcaggccgtaagcgaatttcagccatttgtccgcatcgccggcataaaggaaatcctgctcggtcacgtctgccaagtcttctttctgaagattggcgatggcgtcgtcgagataactgatgatttgagtatagatttcctgttgcgtatccattttcggggtcatgtagaccggagagcctttttcgtccaccagcgcagcctgactgcacggggcatcgccgaagaaatcggcaatcagtgcgcagttgtaagcggccatcacttcggccattccccgggtgacgtcgttgccgtgatctctgcctccttcgccacattggtcgatgatgatgcgggcgttcttcaatgaagaatagatgccgttccatgagttattgaaggtagacgaggacgacggttcgttttcgcggacttcggcgtagtaaagctggttgtctacacctacttcgtattcgatgtacgaagaggcgtatgtattgatgtcaccgctggcgttggagaaagcggtagaggtgattacatctgccaagataaatcttgaggcaacactggtggtgtggtcgtggtccttgttgattctgtccatcgtgtcctccgagcaagcagagaacaaagacagagcggcaacagccagtacaccggttattttatcatatcttttcataatcttctttcgtttagctaattagaattttacatttacaccaaaaccgtagcttgcagttcccggcagagagaaacgctcgaaggcacctcccatgttgtcgttaccctgagatgcttccgggtcgaatcccttcagctcggaccatacgatgaggttgcgggcaaatacgtttacatctacgtttagccatttgctggcgtataccgggtagcttacagaaagctcacgcagtttgatgaacgatgaatcgtagatataagattcgttgatagaacgcaggcgggtgtaataagcctgtgcgttagtcacttcgatgtcgttggcggcatacgtcgggttgccctgcgcgtctgttccggtttctttcacggtgttgggaacgacgaagttgctcttgcgtttttcgcccgattctttggtgacaccgtagaagttcatttcaccggcagtaccgcagtacatttgtccgccttgtttccagtcgaacacggcagcgatacggaatttgtaaagctcgatattcgtgttgaagcccagacggaagtcgggagaaacccggccgatcacgtcgtcttcgcccacctgcggaagtccgttcgcgtctaccacgatctgtccggccttgttgcgcttgtacgtgctgccgtatactacggggaatttctcgccgataccggcacgcacctgcggagtgacgaatccgccgagatagatgctttcaacacccggtgcaagttcgtctacgtagttgtcgatctttgagaagttgaaagcgaagtcgagcttgaagttgcggttgttgaccggcgacactcccagtgtaagttcgtgcgagttggtatgaatcttaccgccgttcatgatcatgctgtcgtagccggtagagccggacaaaggcacttcgaagatctggtcttttacgttctgacgcgagtaggtatagttcaaagtgaacagtccgttgaagaatgtcaggtcggcaccgatttcgtatgacttcgtgttctgcggtttcaggttcgggtcatacaccttataataagggatatatgccatcgttccgttgatcgggtaggcgatgggcgtgccgttgaagaatccgccgccgtagctcggggtgtagtaatagctttgcatatagtcgcctgccatacctacttcggcgtacgatgcgcgcagcttaccgaatgtgaggatgttgtttttcagcggttcgagttcggtgaacacaaatccgagcgatacggaaggataagtgaacgaacgattgtcgcgcggcatatttgaaacgacgtcgttacggattgttccgttgaggtataccatgtttttccatgccagagacaggttggcaaagttacctaccgtacgtttcttgttgtacgacttggaactctggtagatagaagcattgttgatgtggttccatcccgggaagttgaagttcatcccttcggagaaggcatattgcgttcttttctctacaagttcgttaccgatcagggcgtcgaatacccagtccttgttgatgtcccagcggtaagaagctgtcagcagcgagttcagctcgttgatgctgtagtggtattcgatggcgtcgccggtgtctgccattgtactgccgtatccgtagatttcgctgtagttggtggtgtaggcgtcgtcaccgagttggtatttcacgtccagtttgtggttgtccgtgccgaatttggtcgtgaatttcacgaatgcgtttccgaagaaacgttgcgagcgttcggtgaacagattgttgtccacagcccagtaggcgtcgtcgatccatgcctggcggtacgtgttctgctcgtacgggtcgccttcgacgtgcgaggggattcctttcatgttgtagctcaccggagcgttgtagatggtagccgtcacgccggagttggcggtagactgcttttttatcttggaagtcacgaagttaccgttgaagccagtcgaccagttggggctgagctgaacttcggcagacattttggcgttgtatctgtccataccggtagtcgggatgatgccttcctggtggctgttacccagcgagaaagagtagtttcctttgtccagattttgggaaacgttgacgttgttgctccaggtaatgccggtgtcgaagaaatccttcatgttgttgtatgctttcggcgttgcccacgggtcaagaccggcttcggcacgttggggcacgtagtattgtccctgacgttttcccattttctgggtgaaagcgttgtcggtgttgccgccgtatgtaggatcgttggcgaggtcggctattttcggtccccagctgtggccggaataagggtcgtatgagccgccgctgccttgtccgaattcgttttgcagttcgggcagtgtagacacgacatcgaacgaaagattgctgcggaatgtgatcgtcggtttgcctttggccactcctttaccgcttttggtggtgatgacgatgacaccgtttgacgcacgcataccgtagagggcagaagctgcctgacctttgaggatgttgatgctttcgatgtcgttggggtcgatgtccaccgaacggttggcgtagtcggtaccgtaggcagcgccgttagcgttgtcggtagtcgttacgtcggcagcggaagagatcggcatgccgtcgatgacatacagaggtgtattgtcgcccgtgaacgaacgggaaccgcggatcgtgatcttggaagatgcacccggcataccggaagacggagcgatgtccacacccgaaacttttccttgtagtgctcctgcgaggtcggtgttggccgcgcgtgtcagctggtctgacttcacgtcctgaacggcgtatcccagcgctttcttttcgcgggagatacccatggccgttactacgacttcgtctagtgacttggcgtcactttttaatactactttgataacgccttgtgtgatcgtaacagtttgcggagtcattcctacataggaaacgcgcaaagttttagaagaacttggtacggcggggagttgccctttcgggaagtgttaagtgtttttggggctatttaaggcataaaatgataaaaagatagcatttcgaatgattcgctgatgttattttatgaaaataacgattttaacactatctttatgtcgtgtaatgtaatttgaatattattaaaatcgtacttaaatcttctcattttatcaatatactgattaaattctttcaatatgatactttatagttaaaaacgtaacacttttttaattttgatataaatagtgttatctttgcaccctgttagagactagaagtctatttataggttaaatttaagagagaatttatgaaaagaaaattgatgttctttatgaccttcctttttgtgggtataggtctggtgacagcgcagacgtcccgagttaccggtgtggtaaccgccgaggaagatggcctgcctgttgtaggtgcttcggtattggtgaatggcactactcttggtactatcacggatattgatggtaagtttacaatcacgaatgtaccaagttcttctaagacttattgatattttaaagcctctctttttcctccttttttattctatcttattgtaaatcagaatataagtgcttctttccgcaacttggcttcccggctcacttactataatcgcaaccttttccctttctttttcgatctcagtcatctttttcgggcaggtacttggcttgttttcagggggcggatgcttaggttctacctttatttgaggctttctatgagcgataggggcagaccggtcttttcggcaatgagttgattgtcaattccttgctttttcatgtcgatggctgtctgaaagatgttcaaggcttcttcgcgacctttcttcaggccttcctcaagtccttcttcaagtcctttctttagcccttcttccatccctttttttattccttccttttccgctgcatccattgtcaccaaataatctcggtacactttgacgctattgtcgtatagctctctctcctttggagacatagaagccacatcagcgatctcttcgagtttttcgaagacggcttttcgtgccttgaatggcaggcgttttaaagtttccatattatttaatatataaatccaacgttcaaaattcgtttcacattcctcttcgctttttttgaagagggggagggcgatgaatatttgccggaacttctccgagaagagttcacctgtctccttgtctgcaagaataacgtctgtccggagttttatgttcttgtccatgatgaaattcatcagaaagactccgtaaacagcttttatttcaaatttccagtcgtgccccgtccggccctggttgacgatggcacgggagagatagaagatggagcgttctttaaaattgctctgcatgcggttttgcatttcgacaattatcttttcgcccgtgtccgtggtgcagtagacatcgtagatgatgcctcgtccttccgggtagtccggcagctgttcgttgttcaaaaacgttaagtcggttatcactcgttcaccttcgagaaggtcgttcagaaattcgattagtaaattcttggagacttctctgccgaatattagtttgaatccgtagtcggtgaacggattgataaatttgctcattgttttggttgtttctcttttatgttgtaaagagatgtttctcttcgcatgtatagtgaagaggcttttctttattctacaaagataggataaattattgttttatgatgcgtttggcgggagaaataaatgacgtgggtgctcaaaaatgttcatctccctcttaaaaatgttcatcttcccctaactcgctttttgaggatgccgttgtaggtgtcttcaaattctgccgagtggttgagtgcccagaggatgtagtcgcccggctcgttctttttgagcagggtggagcggtattcggagctgaggactttccataaggtgccgcagggaccacccagctttctgcgtcgggcgagggcgaggatggctttcacggttggttcgttccggatgccgatggcgtccatgttgaggcgtagcagggattcggagaatcctccggaagcagtgctttcgttcggggcttcttcttgctgacttctttcgtattgagttccgttgtgcttggcttcttcctgctggtttctttcgtactgagttccgttgtgcttggcttcttcctgctggtttctttcgtactgagttccgttgtgcttggcttcttcctgctgacttctttcgtattgggttccgttgtgcttggcttcttcctgctgacttctttcgtattgggttccgttgtacttggcttcttctagctggtttctttcgtactgagttccgttatatctagtttctcccttctgatctattccttcatttcttctttcttccttattttcctcccctctttttccggacgagatttctaaagacaaacctttgacagcaacaggcgcagcctgaaaaacgccgtttgacggaacgggcagctgctctctatccttctcccattcattttcggttttgctttgtctttccctttctttgtctctttctctttccggtttgcttttaatctcagtatctgtttccgatttactttcgatttctgtatccgtttcctgttttgtttgtgggattgttgctgcaatttctcgtttttttgcagcattaattttcatagctgcttcgtcggtcactgtttttgtagcattgattcctgtgcctgctgcatggatatttgtgcctgtcgtgccgattcctgtctttgttttagtaacttctgtagctgtgatattgattcttgtttttattgcgttgacttctgcgcctactatatggctttccgcttcatacacttctgtaccttttgaatttatattatttcttatttctgcggaattattttccgttccatcctctccttccttgatgagccaaaaccgttccagcgggagtttgtatttccttcggctgtcggtaatgattttgtggtattgctcttggatggcttgcgaagtcagaatcccgtactccttatatatataggtgtcgaatagtccgacggacaggcagtcgtcgatgatggcctgcatctcctcctcctcgcaacatacttcctgcgaaatgtcgaacaaggtatcttgattccatgcgacataaaatcccttttctttgtagatgaggcagagcagggaagtgagtgcggcaattcctgctgcatgatgacggttggaaatgcggcgtaccttcctgtcttggaagaagttgacatcgagcgggaaataatctaatccgggtttggaaatacgggccatctttttgaatatttagagtgatattgaatgataaataatgaatgataaataatgaataaggcgaatcggtaattttaatttagctcatttcagtatggtgataagctacttgatagtcagttctgtatctcaactgagggtgactagaaagtcgattctatctctattctcctccttcccgaaggaggagaatagagttactattgcgtacaactactccctagaactcctttttcacatcgaagcagggacaggctttcatgtattcattgggtgagatgatgccgtctccgttgaggtcggggcttgtgtcccggtgtccgatgacctgtttcacgttggggaaggccagttgcagagatttcaccagtcggatgagggcagtgcgttgtgcatctgtccgtgtgtcggcggggcggccttccttgtccagtccgccgacgtagcagatgccgatggaacgctggttccagcccatacaatgcgccccgtcgagggtgacgtctcgtcccggttcgatggtgccgtcgaggcggatgacgtaatgatagccgatggaccagaagccacgggcacggtgccagcagtcgatatcggcagcggtgatgtcctgtcccgcacgggtggcggaacagtggatgatgatggtgtctttcattgcagaaactcctttctttgtcctctttctctgggcaatatataagtgttgaaaccaaaaatggcggattcttcgggagacaggcggcggtaatagtgttgcgtcactgaatggtgtgcgggaacaaagagagaaataagaggaagaggcgatgaaacaaggggagaagaaactgactgcacacatacattgcctgcttcggacttcccgattgaattactcgatctgcctgttccgagcagattgcctgcttcggactctccgactgaattgctcgatctgcctgttccgagcagattgcctgcttcggactctccgattgaattgctcgatctgcctgttccgagcagattgcctgcttcggactctccgactgaattactcgatctgcctgttccgagcagattgcctgcttcgaactccccgattgaatcggctttaacggtcagcacaggtatttcgggtgctatcagaaagcattcttccgaaccgcttctttcggctcttggctttttcttcatggccgattgcttcagtctttcggggtgtaataaatgcagcaccagccaattacgttgtttagggttcatttgttccccttttaccagtgcgttcatggatggataggcttgcaggatatttcctgcctcgtccgttgtggcacaggggacgggggagagggcgggtgacgacggacgcagaccggtccggatggcgtgcatgacattgtcgtaggcatcgcaccattcgaggttggcgacgtggttgttgagcttgtttccgtcgaggtggttcacttgggggagacgcttcgggttggggataaaagctgttgccactaagcggtgtacagagtagccgacgtatatccccttttggcggatggccacgtactcataaccttttgcggtaatgctgctgctgattatcaacttcgatttgcctttgaaactcaatatccgcccgtggtctgaaaccatatagtcggaatttgcttcgataaatctccaattttccatactttattctttatattgttaataaaattatacttcgttaaaaagaaatcccttttccgaaaccaccggggataaacggcgcagcctgcatggtagaaacggcgtagcctgcaaggtaaaaacggcataaacaaggactgttaaacggcgtagcctcctcgctgacatgaggcggttccgcccgcttactccggtctttgacctttctcattcctcctctgcacggggttcgagccgttcggcacagcgaacgagaaactccagttcctcccgacacccttgaatggcttcgtacaaagagtccacatgatacattctgcaaagcgtttcccattcttttcgttcttctgaagtcatttgttctccgaaattcatttgctgtccaaaacttatctgctgtccgaaactcatttcaaaatttatctgctgcccgaaactcatttgctctccgaatctcatctgctcttcgaaactcattcgacgcaaaggaaattttcggcatgaaacgtgcgccaccctttggcttcgaggtcgtagtagactacaaacgtattttccggtcgtggcatataggggcggtgaaaactgtgttgatatccggtgagcgtgccgacagcgtggcgcacggttccgtcctgcttggtgtagcagaatttcacgttctccctgtgcattttccgtatcagtccaccgattcggtgggcgatgatgagcgcatcacgccggttcatgtcattgttgcgacggatgacggcggcccgcctcatgagccgtacccgtgggagggaatgttgttttttcatttcagtcatatgattcaattgttttttattgatttcggggcaaaagtagattatgggtagaataaaaaccgttcacgcttgactaaaatgaaaaaatatgtagaaagagtcacgcgtgacccaaaatgttaaaggtaaatcccgaattttgtcggattaatttaaatataattagtaatgaacaaaaaagaaaactgccagaacagtagtgaaagagaacaacacattgaagtaaaaaggactgtaaatcagaaaagtacaagtcagaaaaaagtaaatcagaaaagcatgagtcaggaaaaagcaaatcagaaaagcatgagtcagaaaaaagcaaatcagagtggcgaaaagtccgtgtatgacgagaacagggatgcccttcaggaaagagtcgaagagaagcaatggaagaaaaagcaatgtaatggcttgcagcacagtgatgacgaagaaaaacagaaagtcatcgattcgattatgaaagtcagccgggataacggctttgacgacgcttatcttcagcagcattcggactgttcggcatcgtcgatcaagcgcttccactcggcctggatgggaaagagaatgtccaattggacgacgatttttaatttagcgcactgcgtgtccgtcaattgtgtctttgccgaaaatttggtcgggatgctggttgtcattattatgttcttgattagagatgccggaattgtgagttaccatatcgactcgcccaagaaagtggtgatagaaataaatttcggtaaagataaattattgcgcatgaaagacgaggaaaagaacgaaaaaggaaaagaaggtaaagacgacgaacacctttgagcgacgacaatgatcgggacaaaggaaagaacaactgacggaatgaggtaagtcctgtaagaacttggtagtctgtattcgtaaaaaaacgattcgatatcagcgatggacttccattttattcccttgttataatgtcaccacaaatgtaatcatattattgagaaaaccatgcagaaacgcttttattctgaaaaataagttttattgttcactcagatttcatattcgatgttgacatcctacgttttctcttttagatatttatttgttttcctttgtcggtttctaccgtattgcacgttcgtcattatttacaaattctaattattgcattctcagttcgggtaaaacgaatccgttttccgagctgagaatgcagatgacggcttttaataagtctgtttgtttttatttctttagtaatatattataaactggcagataagtcgctctaccaagttcttacagaacttacctttttgtatagtaatatttaaagatttaatagcaatattttaagatattcagtgatcggttccgcaaacaatcaaaacaatcactatttatggaagcgcggataactcgaaaaacagcggcacttgcaatctttctgatcagtgcatttcagacttacatttatgccggccgcccctcttcttgtcaactattaatcatcaattcttataccgaaaactgtctgtggagcgatgactttatggcccctgtctataaagagtttcgcgtccagaacagcccggttgacatatgtgccgagcacatggaactgatggcgaccgttgtcccggatatgcgcaaacaggtcttcatgtccgacaggcgctggatcagtgcgcaatgcaggaaagaagcggaggaagtgatgcctttcctgttgatcggcggctatttctggacagacagtgaaataaagaaacatctgctcccggtgatcaaaagccgcctggacggagcgtcgcatccgcacagagtggaaacgacagcgatggggacgcccccatccgtcatcaattatgccgactacgtagagagcggactgttgctcggcctgtgtcccgacgacactgtttttggtatgaagccccccacttttttcgagcggaacaaatattatctggccctgtttttctctttgatggcactggccgtcatctatgtgatatggctccggagggcgctgcatgagaggagcaggcggctggagatcatgaggagctatagcagtctggtcgaaaacatgcccgttctctatgcccgtgtcgagctcatattcgaccccggtgcccggattatcgactatgtctaccgggaagtgaatcccactttcgagaaatacatcctgcccaaagaaaaaatactgggaaagaaatacagcgaactcaatccggattattcgccggaactgcccgacaggtacagcgaactgaatgacaacaggcaaataacctttcagtattatctggagaagacgaaaactcatctgaccgtcatctccatacattccaaaacgaaaggctgcgtcgatgtctttggtgtggacaataccgaactggtgctgacgcagcaaatgctgaaatccaccaaccataagttgtccgccgccctcgacgctgccgacatgaccccttggaaatgggatttgcagaccggcctcctctcgtgcaacgtcagccacgacttgtacgtcaccgaagaggaggtgacgcatgacggcaacctgattatcgtgcccacctccgcctgtttcgcgaaaatctgcgatgaagaccgcgaacgcgtgcgggacgccttcgagcgcctcgccaatggcgaaacgcagaaaatgcgcgaggaatatcgggtaggcagacagtggcttccctccccgcaacagaatgaatgggtagaagtgcgcgcagccgtggacgagcgcgacgcgaacggaaaaccgctgagccttatcggcacttcgatgactgtcacccaacgaaaggaaatggaggaagcgctcgtacaggcaaaggtgaaagccgaggaggcgaacacgctcaaatcttctttcctcgccaacatcagccacgaaatacgcactcccctcaacgccattgtcggcttttcctcgctgctggtgtcggcggaaagggggatttcggaagagaaacaggaatatatcaacatcattgaaaacaacaacacactcctgttgcagcttatcagcgatgtgctcgacctttcgaagatcgaagccggaacgatggagttcgactacgccccggtagatgtgcacggcctgtttatcgaactcgaagatacgttccggttgaggaataaaaagtccggcatctgtatctgctatcaccgccggacgaccgaatgtgtcgtaaaggcggaccgtaaccgtctggtacaggtgatgatgaatctgatgaataatgccgtgaagtttaccggggaaggcagcattgagttcgggtttgatgtgcgcgaagacggtttcctgcatttctatgtcaccgacaccggttgcgggataccggaggaacggttggaagaaatcttcgggaattttgtcaaactcaacagctttgtgcagggcacgggactcggactcaccatttgccgggcaatcgtcgaaaggatgggaggaaagatcggtgctgtctcacggctggggcatgggagtactttttggttcacgctgccttatacggccaacgaagagaaggtttgaaagggacgtggcgtgacggaaatatacttgcttcccgaagaatgggactttttagtcagccccttcccgaagggaggggaagccatgcggatagtcagctcgaatcaaggctcccccaagaaacggaagatgagccctacttgtgccggagtgagcaggatggctttgtcggaatatcccgtgcgggcgagttcgttttgtagtgccgtgttcttggcgatccagctgcggagagtgcggcgtgcggaggcgggctgtatgtggggcaggtagagagtggccagttggcttttgctgtatgcctgtatgcggggcagggttgcattttcttcggaagttggtttcatgatttttgctttcattgtcttttgatactgcttttactatcttttctatatttctttttttcgttttcgttgccaatgtaaaggtacgccttttttagtcgtttggtgttgctttgtacagaagtccttggaggcagtatttgtgcgaggccgtgccgactggtgctcttccgttacaagtcgttacatcgtgtatccggacttttttgccatcgcctacttttgtcaccgtaatcgattgcacatagaaaacttacatcaaccattaaaaaaagaaaggaaaacaaccttatgccattaatttacaaaccttaccaggcgaatatcgccaacaaagcgggacagaaactgtattacccccgcctcgtgaaattctcgaaaatggtcaacacgcagaagatggcggagctgatcgccgagaaggcttctctgacaccgggtgatgtccacaacgtgattcgaaacttgatgtccgtgatgcgtgaacagttgctcaacagccgcacagtacgtctcgaaggcttgggcacatttacgatgatcgccaaagccggaggaaagggagtcgtgttggaaagtaaagtcagcagttcgcagatcgtttcgctgcgctgtcagtttactcccgaatatacccgttctgccgatggcgtcactacccgtgcactgacttccggagtagaatttgtccacgtcaaggacgtagcgggcggctttgtggacgacgatgataaaaatcattcgggaggcggagacactcccggcggaggaagcactcccggaggcgacgacgatgaggctccggacccaaccgtttaatgaggctgaatcgctgactcactaatgcatgatcggttcccttattaaattgctccattcactctgttttttaactctaaagaaggaagctatgaaattatttttagaaaagttattggatattttggaagcactcttgcgcttccgtcgtcggaaagctaaaaagacgggagattcataaaccgacctcctctcttaaaaactagagaatccccttttatttaaaaccgtatctgtctatgatatggggttgaataaaggggatttttgtatgggaaagtaataggtaattgtatagtaataggtagtggaatttaattcatttcatttcttgtgcgaaatgattcatacctgctctgagatgtaggatttatggaaaagtgtattatcaaaaaatggggtcacctatacccctgtttgctacattatgttttttgagcccgataatgcggtagttggagaattttgacatctataaaagaatatcccggcagattggataacagtcaaccgcccaatcataaaaagggctgccccaattttacttgggagcagcccttcttgctttttccggtttatctctaatgcattttatttaatcagatagactttctgaagataaacccttttgttgtgtgctttttgatgagcaaccttacggcatttctgtttccatctggaatttccggcttaccttcatcaggttaatgatgtaagtcactacattttgagcttcctgcaccatggtcagataaaccatacttacccggatactgcccgactggctttggatgcgctgcaactctttgcgtttcagttgcgatagctgtccgttgaggtcgttggcacggcggatttcctcttccatattctgataatcgttgttttccaacttcttgcggcattgctgaatcagataagtgatgtcctcggccacgtcgctgaattcacctttctgaatggcgtcgagcgggttgaagttattgtcgatgtgttcaagacacggttcgcagaggcgcgagatgctgtacaccagttcgctggcgaagtcgttgccttgatagtagtagagtcctttttcgagcacggtgttgttgtcgaggcggcacatggcaacggttccggtgcgtttcatctgcttgatgagctgcttttcgaatttcgtggaacccatggcacgacgcagtccgcgcaggttttcgtgtataaaggaggtgacggtcagttcgaaattcgtttcggcgtactccagcactttggcgagttcttcgcgggtatgtttacgcatcagttgcagcgcttcttcgctgtcggcggtctgcatgagttgtttcagcgtttcgttgcctttttctttcgccttgcgtttcttgtacatcacctggctgcggatgaggatgaaaatcgctattccgatcagtgcgatgatggagatgttgccgccgtagtgcagcacgagggctacgaagaaacagatggtgaaggcggctccggcagtgatgaaccagccaccgatgacgctcagaacgcctgtgatgcggtaaacggcggagtcacgtccccatgcacggtcggcgagcgacgtacccattgctaccatgaaggtgacgtaggtggtagagagcggcagtttcagcgacgtacccaaggcgatgagcagaccggcgaggacgaggttgacagaggcgcggacgaggtcgaaagcggctccgtcggctatgatggcttcgtttttgcggaaacgggagttgatccactgcttcgcgctttcgggcatgatgcgggaagtgccgttggcaagtgtcatgctgaaacgtaccagtgtgcgtgccatcggggtgcttccgaagttctcttctccttcatcctgacgggagaggtctaccgaggttttgatgacggcgtgcgcctttttggaggtgcagagggcgtagaccatgatggcgccggcaccgataaggaagtaccacggtgtcttggcggggcccagcagcgaggtcatcaggaagctgtccggacttgctccggctccgttggtggtgtagtctatgaaggaggagtagcctgcgaggggaactccgatgaagttgacgaggtcgttgccggcgaaggcgagggcgagggcaaaggtgcccatcagtaccactactttgaaaacgttgactttgagccagtgcagcacttgcatcagtgccgtgaagaagacgaagaagctggcgatgagcagcagcgtgttgtcctgtatccactgtttgttttcgggggtcatgaaggagctgtctttcaaccctttaatcagcatgaagtagatgatggaggtggcggcgatcccaccgaaaaggccgatgctgtatttgatgtttttcgtgtaattgaacgtgaaaacgatgcgggcgagccactgtactaacataccgaagaagaaggcgatggctacggacacgaaaatggccatgatcacggaaagtgctttgtcggtgttgatcagatcgcccaacgcaagggtggcgtcattgtttactttgatcagggagagggcgaaagttcctccgagcagctcgaagaccagtgagacggtcgtggaggtgggcatgcccatagagttgaagacgtccagaaggactacgtcggtcagcatgacggcgagcagtatacacatgatttcggcaaagtagaaatgctcgggctgatagattccgtgacgggctatatccatcatgccattggacagggatgcgccaatgaaaataccgatcccggctatgaaaagaatggttttgaacgaagcggccttggcgcctaccgccgaattcagaaagttgactgcatcattactgactccgacgatgagatcgaacacggccagcacgaacaggaaaatgataatgcataagtaaattgtctccataaagaaagttgtgtatgtttatttatggaggcaaagaacggagtttaacgttgcggaaaaatgtcatacgtgttacatttctgttacaatgtcttttttgagccattcataaaaatcgtattgggcacggacagcaggggtgccggacgctctttttttgaatacgttttgcagtttgtcgtctacccaacaggctttttggttgtcagcgagctggatatggagcatttcgatcagactggcgcgcaggtcagggtcgaggatgggggtgacggcttcgatacggcggtagaggttgcggcgcatccagtcgggcgagcccatgtatactttggggtggccttcgttgccgaaataccagatgcgggcgtgctccagaaaactgtcgacaatgcgggtgacatggatgttacggctgtatgactgctctggtatgaggcagcagatgccgcggacgatgaggtcgatctgcacgccgtgttcggaggcctcgtagagtcggtcgatcattgcagggtcttggagggcgttcattttgaggatgatacgtccgcctttgccttggtcggcaagggatatttcacggtcgatgaggcggttcagttccggtataaggttgaagcgggcgacgaggagagtggtgaatttcggatcttccttgccttgcagggtgcggaagaggttgtaaaggtcgttcactatttccttgcggcaggtgaaaagtccacagtcggcgtacagggtggcggtcttttcgttgaagttgcccgtgctgatgtaggcgtagctggggattttctctccattcagtccgcggcgacggacgagggccactttggcgtgtacttttagtccggggatgctgtaaatgattttgatgccggcggcttgcatcatttcggcggtggcgaggttgttctcttcgtcgaaacgggctttgagctcgacaaatacggtgactttcttgccgttctgcgcggcggctatcaaggtgttgatgacggctgagttttcggctacacggtattgggtgaccatgatttcacgcgtctccggattgtgcactgcttcgtagaggaagtgggtgaaatgctcgaaggagtggtacgggtaatacagcagcagatccttttgggcgacgtagttgaagatcgattctttttcgtcgaggatgttcagcttcatcggttgcggcttttcgatgcggcgtagagacttgttcgggttgggcaggtggcgcaggtcttcgaggttcaggtgcttgtcgccggggacgagttcgtcacggtggatgtggaaggcgtcgaccagaaagtcgaggaagtcttgcggcatggcacggtcgtagacaaagcggcagacgtcgcctatcttgcgtttttttaccttctttttcagttgggctacgaggtcggcgctgctggcggtgtcatctatcagaatgtcggcgtcacgggatattttgatgcagtagctcgaatcgacgtcgtagccggggaaaataaggttgaggttcgctttgatgatgtcctcggtgaacatgatgtaatagttgtctccacggggcggaagttcgatgaaacggggcactttggcgtacggctgcttcatgacgaaatagaaaggctgccggttggcggggttcctgttttccttcggatagagtcggatggcaaggtagagccggttgtctcgcagaaaagagacgattttgtctttcgatacgggcacgggttgcaggtaggggaagatttcttcccggaaaaagtccttgataaactgctggtgaaacggttccacgtgtctgtcctgatagaagatgatgtggtttttgcgcagggcgggcagtatcttttcttcgtaaatgcgtacacggtcgtccagctggcggtttacttcgtggttgatttcttccacgagttcgcgggcggattgtacggtttcttcatcgctctccgttgcgccggatgccacggccttgtggtccgccacccggattttgtaaaactcttccagattggaggagtagatggagatgaaattgatgcgctcgtatagcggcaggtgctcatccagcgcttcgagcaacacccgatagttgaatgagagccagctgatatcacgtttgaaataattatatttgctttccatgtgctttaagattttcccaaatatagtatctttgcaggactaaacaaagaaaattatgacaagaattggattattgtccgatacccacgcttattgggacgaaaaatatctcgaatattttgaatcgtgcgacgaaatctggcatgccggagatatcggttcggtagaagtagccgagaagttggcggctttccggcccctgcgggcagtttacggcaacatagacgggcaagaaatacggaagatgttcccgcaggtgaaccgcttcacggtggacggagcggaagtgctgatcaagcatatcggcgggtatccgggcaagtacgacccttcggttatcggcagtttgatggcacgtccgccgaaacttttcatcagcggacactcccatatattaaaggtgaaatacgacaaaacgttggacatgctgcacatcaatcccggagccgcagggatgtccggtttccataaagtgcggacaatggtgcgctttgtcatcgacaacggaacgttcaaagacctcgaagttattgaactggcaggatagatttcttacaattcattttgtcacgtcagatttctttccgacctttgcacacagtaaaatgaataactcagacgacaatgaaaggaattattctggccggtggaagcgccactcgtctttatccgctttccaaagcgatttccaaacaaatcatgcctgtatacgacaagccgatgatctattatccgctgtctacgcttatgctggcagggatacgggaggtcttggtcatctctactccgcgtgatttgccgatgtttcgggacttgttgggctcaggtgaggagctcgggatgtctttctcttacaaaatacaggagcagcctaacggactggcacaagcctttgtgttgggagctgatttcttgaacggtgaggcaggttgtctgattcttggggacaatatgttttatggacaagggttttccgctatgctccggcgtgctgccggtgtggagaagggagcctgcatcttcggctattacgtgaaagatcctcgggcttacggggtagtggagttcgacgaacaaggcaaagtgatttctctggaagaaaagccactggtgccgaaaagtaattatgccgttcccggactttatttctacgacgctaccgtgacggaaaaagcggcttctctccgcccttcggcacgtggagaatatgagataacggacttgaaccgcctgtacctcgaagaaggaacactgaacgtggaactgttcggacgcggattcgcatggctggataccggaaactgcgacagcctgctcgaagcctccaacttcgtggctaccattcagaaccggcaaggcttctacgtcagctgtatcgaagagatagcctggcggcaaggatggatttcgtccggacaattgctgctgcttggacagaaactcgaaaagaccgaatacggtaaatacctgatagaactgtctaaacaacccttgaaataaacataaataatcatatatgaaaacttatctggtgaccggtgccgcaggatttattggcgccaattatattaagtatatcttggccaagcacagcgatataaaagtggtggttcttgacgccctgacgtatgcgggtaatctgggaactattgccaaagatatcgacaacgaacgttgtttctttatcaaaggagacatttgcagccgcgaagtggtggacagcctttttgccgaataccgtttcgactatgtcgtgaacttcgccgccgaaagccatgtagaccgcagtatcgaaaacccgcaactgtttctgatcaccaacatcctcggtacgcagaatctgctggattgtgcccgccgtgcctgggtgatgggtaaggacgaacagggatatcctacctggagaaaaggagtgcgctaccatcaggtatctaccgacgaggtgtacggctcactcggtgcggaaggctacttcacggaagaaaccccgctttgtccgcatagcccgtacagtgcttcgaaaaccagtgccgacatggtagtcatggcttatcacgacacttataaaatgccggtaacgatcacccgctgttccaacaactacggcccctatcattttcccgaaaaactgattccattgattatcaagaatatactcgaaggcaaacatctgcctgtctacggtgacggaagcaacgtgcgcgactggctttacgtagaagaccactgcaaagcgatcgacttggtagtgcgcgaaggcaaagagggcgaagtgtacaacgtaggtggtcacaacgaagaaaccaatcttgaaattgtgaagctgaccattgccactatccgtaaactaatgaccgagaaaccggaatatcgtcaggtccttaaaaagaaagtgaaaggtgaagacggagaaatctccgttgactggatcaacaacgatctgatcacttttgtcaaagaccgtctggggcacgaccagcgttatgccattgatcccacgaagatcacgaacgccttgggctggtatcccgaaacgaaatttgaagatggcatcgtgaagacaatcgtatggtatcttgaaaatcaagactgggtggaagaggtgaccagcggagactatcaaggctattacgaaaagatgtacggaaaataaatcaatgtcggatcaagaatcctattgatagcaaaatacccattaacagcatattacgtgaagtctcacctagtatgctgtttaattttttaccactgtgaatctgcaccatccgtctccatgtgaggacatgaggaatcaggtagagtaacggaagaagtgcggcaaacaagtgtccttcgaagaagaaccagaaacacagaagacttgctgccacccccagcatcaaataaagatagcgtccgaacttctcgccaaaacgaacgatgaccgtccgctttccgctccgtgcatccgcttcacggtctcggtaattgttgactaccagcaaggtatcaatcagcagtccgcagatcagagaagctaccgttgtgtccgaagtccatgtcagcgcctgtacgtagtacgttccgcccacggggacgaatccgaaaaatacgatgaccagaacatcgccccagccgttgtaggataatggataaggacctgtggtatagaggaaagcgaagagtacgcagagaagtcctactatggtcagctcccatccggcataaaacagcagcgcagatccgatcagacaggcgaacaggacggtgacgatgattccgtttcgcatggctctcggtgaaatccagccttgtgcgcaggctcgttccggtcccagccggtcttcgcggtcggttcctttgaggtagtcgaagaggtcgttgataaaattggcggcaatttgcatcagactggcgaacaggcagcagataagggccggcaaccattgaaaatgtccatccatataagcaagtgcgctaccgatcatgaccggcgtaatggctcctgtcagagttttgggacgtgctgctaatatccacgcacgcagcgagttacgctttacttcttccatgctttaatatataataataagttttgacggacaaagatacatgatttttcctatctttgcgcctcaaatagtgggggaatgtgttatatgtagaagaaaataaaccaaagaagatgaaaaaaataaattacctgttcataatattcgtattattcctgttcgtatcttgtaagtcaaagaagaatgttgtatcgatcctgcctcgtcctgtgctcaatgtcgattccgtccgtccggacagttccgccgctatcgacggcttgtttgctccggatcattctcagcttgccgacttgaaagtttcgacgaaaaagcagaagaaaacagcgaagaaagaagctgcgaccgagcaggaagaacgtaatttggtacttcgcggaacgaagatcacgtcttctaccgtgaacgtccctgccacttatagcggcatagaccgtgtcgtggaatatgacttcacccaccgtgatgtccccgaagccttcgaaggcttccgcatcgccttcatttccgacttgcattacaagagtctgctgaaagagaaaggcttgaacaacctcgtcgatcttttgatcgctcagaaaccggacgtcttgctgatgggaggagactatcaggaaggctgtgaatacgtagaaccgttatttgccgcattggcccgtgtgaaaacaccgatgggaactttcggagtaatgggaaataatgattatgaacgctgccatgacgaaataatccgcacgatgaagcattacgggatgcgtccgctggaacacgaagtcgatacattacgcaaagacggtcagcagattatccttgccggagtacgcaatcctttcgacttgaaacaaaatggggtgtcgcccacactggcgctttctcccaacgacttcgttatcttgttggtgcatactcccgactacgtggaggatgtttcggtggccaacacggacatcgctttggcaggacatactcatggtggacaggtacgcgtattcggttacgccccgatacagaactcccactacggcacccgctttctgaccggactggcgtacaattcaactaaaatgccattgattgttactaatgggatcggtacttctcagatgcctgtacgcattggtgctccggcggaaatcataatgattacgcttcatcgtctcaaagagtagatgatcagtgctcccttatactctgtcggatatattctctaatatactcccaaacctttggatgcaagaagtatcttacatctttcttctcatcaagtgcctgacggataaacgtagaacttatttcaaaggtaggtgaatggaccagacggactgtttcgggcagcccgttttcatttaccgggaatccggggcggggatagataagaatacggttttctttgatgatgcgctccgattgataccagcggtcgaagcgggcccagttatccgagccgataattaagtagaagtcccgttccggataagtttcatgtagcttttccaacgtatgtacgctgtatgaagggcggggcagatgaaactcgaagtctgaagagcggaagcggggatattcttctgtggcaagttctactaaccggagacgcaggtcgtccggccatagctccgttcccgctttcagcgggttttgcgggctgaccataaaccaaatttcgtccagtccttcatactcgcaaagatagttggccaaggccagatgtccgatgtgtaccggattgaatgacccgctgaagattccggtttttagtttttgtcttttcagagactctttcattccttatttagaaattctttgataactttcagtgtctcagcctttgccgcctccagatcatcattgacgatgacacgatcaaactggggagcaaaagtcatttcgtattccgcctttgcgatgcggcattcgattacttcgggctcatccgtgccccgacccgtcagccgacagcggagttcttcgatggagggcggctgtacaaagatggacaacgcacgctcaccgtaatactttttgatattacatccgcccactacatccaagtcgaataccacgttctgacccttctccaactgcttttccacttgttctttcagcgttccgtaataccgatccttgtacacttcttcgtattccaaaaactcgttgttctcaatgcgacaacggaactcttcgggagtaaggaagaaatattcaaccccgtgtttctccgtcccgcgcggtgggcggctggttgcagaaatggagaacgcgagatttaagttctgcgtcagcagatagttgataatagtcgatttgcccgaaccggacggggcagaaaaaataattaacttgccagtcatttgtttaattgaaaattgagaattgaaagttgaaaattgaaaatgtcgacaagtgtatgattttcaactttcaactttcaattctctattaaataattacattacgttcagcacctgttccttgatctgttctagctcatctttcatttgcacaacgattttctgcatttcggcatggttggacttgctgccaagcgtattgatttcccgtcccatttcctgagcgatgaaaccgagcttcttgccttgtccgttgccgctttccagcgtgctgatgaaatatttcaggtggttggtgaggcgttgtttttcctcgttgacatccagtttttcgatgtagtagatcagttcttgttccagccgattcttgtcgtagtccgtgttcagcgtcttttcgagtgcgtcggtgatacgttccttgactttctccacccgttctttttcgtaaggagttatcttttcgagcaacagtgcgatgttagctatcttttcgcggaacttcttttccagtgcggcgccttcctgtttgcggaagtccaccagatgaccgattgcttcgagaacggtggcacgtaccatttcccattcttcttccgtcaactcttggatttcagtcttagacataacgtccggcatacggagcaacgtctgaaaccagtcggtggggacggggatgccgagattttccgagatcgcctgaatctgtttgtagtagccttccaccaacacttggttgataggagtcgcgctttccgcactctcttttttctctatccagaggctgaagtccacctttccacgttccagcactttggagatttcgttgcggatttcgatctctttttcacgataagccggagcgatgcgagtggaaagatccattgctttgctgttgagcgacttgatttctacgtttatctttttatctggaagttcggccgtagctttgccgtatcctgtcatcgactgtatcatatacttaaagttttgtgcaaaagtacacgaatattttaagaattggaaataatcatgtaaatttgtatgtatatctgattatcagagacttatgtgtactgttcttaaagttggttcatatctgtcctaataaactagtcgcaaatatagctattttcaatgatacatttaaataatagttgtaataaaagactttgattgcaaaaaaaataatgcaagaagtattaggttgatgaaatgtaagctctgatctatttggggccaaatagaaatagagagcgtaagtaatccaaataatgaattggactagattgttgcgctggaaatagtgttagctaatattggcagtgaagcagtctctattcataaatataataaaaaggagaagaatactgggaaatacctacttttaatgattcggttaagcagattggaaagagtgatgcaacttcaaagagaacagtttcactggtgaatgtgagggcaaaattctataatgaaattgatatctccaatgaagtttatatgtagcttattaggagtaaatataaagatgacgttaatgataaagaatagtttactaaataagtgctttttttcagtacgtagataatatggtgtaattatattttttcttatatttggggcggttctcggaaaatagggtaccatttttattaatttaaaaaataattatatggaaaacgcaattggatgtatcgtaggaaatgcatatacctccatgttatcctccacaggtagacatctttcttctgccatatgggggaaagttagttgttttgttgctggtgcagttgcgggagcgggtgtcacttattgtgttatcaaaggtaaggagataagagaaaaattgcttacccttatggtagttgatcctaagatttccaaaacattcattttggataatctttctcataaaagttggaagcatgcagggaatatatataaaataatcaattgtactacagttcatatcgggctatctgttcctgaggataacggacgcttttcaaaaggtaacaatattgagctgttgcataagtcttcggcagagcagaccgttggtgcttctgatttatttgccggagaagtgcctaaagagcatgacttgttttcttgcacccagcatcttgaaacaatgtctccccttcctaaagaaaatgcggttgatggacagcgaacctgtgaagttgttgtttcttatcctgtcttttctaattccactttttgccttcctctgagcaatgagattattggtaaattgtttaatggaatgcggggtaagtattttcatgaaaagacatctctagaattgttgacttatgtgttgactggcaggggtgagaagtctgagggtaccatatccattgaatggattgcctctcccaggagtttctcactgttcattggcattgtatgtgctccatatcacaacaaatggaaaatgggcaaatctctctttaccgggcgtataaataagaatccctcatgtgatttctctagaatgaccgaactgggtttagtggataataacagggtttctcctgcactaaaaaagaataactattttgtaagagagaaagataaggacttgaaattccttcttgtgtttctttatgaactcttctgaaaccatcattctgtattgctttatccactcctcttgtcccttcccggacaaggggagtttttgtttccttgtaaattattccagctattttcttgctatatttcagctattctgtatagctctgttttagcttttatatatctgaatattagcttgctacatcaaagacaatgtctatatttgcctcgttttcaagcttgattacattattaaatataataaatatgagaatggaaaaaagtattttagatatccttggtatgtctttattccagactacactctctgattttttggaaggtcttaaattcaggatgcagaagagtggtagcggagaagtcaggccggtagcgacttctttaagtaataaagggttggtatacggtacgttcggacttgtcttcgttctggggtgttcggtttctactgctcaacgcataaagagtagcggtgtcattgatgcagctatttctcaaaacggtaaggtcgttgtaattgatgttgagcgagctttggacatattgagagtttctaataaaaaatggggacgcaagtagtctcaggtaattaatcggaatagacagtttcgctgggaaatatgccggctgttttcaacggtggagctgtctgttcataaatcaagaaggaatctatgaaaagtctattgaccttcaatgaagttcatatgtagtttaataggtataaatttatggatgtaaaagatagcctactgtcaggtgtgtctttgtataacagcttgatttcaaaaggattattcctttgttttattgcttatatttgctctcgaaaatgaacataacttataatttctttaattatggtagatgataacaaacctctttctgtatctgatattgagcagaaagaacaaatgaattaaacgatgctagaaaacaatcaaaatcctgtgactgaagtatcagagcagggagccgttcaagcaacggtagagaatgttaataatggtatgatacctcagggtagtgctacgtctgatagtaacagtagcataaatgctgttgtgccaaatgggacagcatcaagtgggacactcctaagtgggacagttctgcagaattcctatcttaagatgtgggacggggaacctttgtctgaaggaaagttgtatcaccgcaatgaaatgataggtttgcctgaatgttccatcatggaaaaccgtgactttttgggacgtgcggaagaatggcagaataagtgccgtgaagtaggtatggcccaaccggccaagtatgtcagagcctggattgtcaaacaggctggatatactcctgcgctattcaacaaggaaaaaggagaatgggaaagggtttccggagatttattggaccggtattattgtcgaatggacggtcacggacgtgctgcgggacatgacctggaattagccgaggctatgaaaaatccggcttatcagcctttcgatttcatcttcttttttgaggatatttgtgatccggatatattccgaaaacagtttgtctccattaacttcgacacgaagaagacgaccaatgccgaacttgcgggttatgctgctgcggtatataagaatgcggatacacaatattacaatgacttgctcaagaccggttatgttgccaaagccgctgcatattatgcgtatgccaaggaaccttcccgggatgacatgaagaagattaacgaagggacgtctgtaagtgttgaccgtccgatggtcgatgcgatgaaacgggccttgacggtatatcggaaaatatttacggggaaagcatcatcaaagcttctgaatggtgttcctcttgcccgctggacgtataatcggctcaagcaggagactgacaaggagaaactgctaaagactatcacccagaaattctctgttcttactccccaatatgttgccgtattgcaggaggccagaggtgtcaagggtgacaggacccggaccactgaaatcgttttgggagaattgtttgacaatattcttaaggattgattatgtctttggggcagtagtaattattgcccctctctaaagaaatagatatatggataatgcttttaaagtacggacattcaaagaggtgattaccgataaaaataatttcaaggagccgggagcggttctgggagatttcatcaaggaaggcgaactttcggttatcggagttgtagctaatagttcggaaacagctttttgttacgatgtcgcctttgccaatgcatcaggcctgtgccattgggaagaaccggtcagtgataaaataaggaaaacactttgtgttgactttgaactgtcagattctcaaatagcccgtcgatacgccaatgttcccgactttgtctcttgtagtgtaagaagggcacatccggtttcttctgcacacggctgttctccggaagatacaataagaaacatagagaagctggtagaggaaaaccgtcccgagcttgttattattgatgacttgggggctctgacaggcaatgctgtatcagtgtctgttgtaaaaaagacgatggaaggtctgaaccatatcagggagtcattcgaacttactatgatactggttgcacattttcgtaaacgtaacggtagaaatcctattgaaatcagtgatatggagggaagtcccgttatctgtaactataccgacagtatagttgccatcggcagttcagtggaaggtactgaaataaaatacctgaaacaactgaagacccgcagtgcccaaaagatgtcggaggttgctgttatgtgtctggaggatgttccctggcttcattttgattttatacggtttgatgatgaattcaaccaccttgtcaacagtcagaaaagtcgcagcacgattactgacttcatgggagagaatattgtaagattgaactctgaaggtttcagcatacgttcgatagcggagatgctggggctctcaaagagtgtggtcggaagatttctaaaagaccggaactcatattcccctcaattgaactatgattaattgcggtgtatattgtttccggatagaatattataatatttttcgtagataaaggagtatatggcgggtacaggtaccaacttgccgttctccacttaaattaattaaagttatgacaacatttttaagacgggcaggaggacatgaacttcctgtcacagcccctcttatgcctgaaaatatcccgggtatgaaggagataaagggtttaataaaagtggatattattaattctaactaaaaaaaaagaaatgaaaaaggaatatcatggcaaggcaatttatcagccttccggcaaagctgccgaatatggcgaatgggcttgtaattttcatattggctgttcaaattggtgcgactattgttactgctcaaaagctttgcatccaggtttgtggagttctatagtaaccttgaaaaaggccttcaaggatgaacaggatgctattgcggtatttaagaaggaactctccataaatttgcaggcactacgtggggccggattatttttcagttttaccaccgatccgctgcttcctgaaacaatggaactgacagcacagggagtaaagacttgtgtggagaatggtgtgaatgtaaaagttctgaccaagcgtgccgatttcatggacaatttctttggattgctggctggctatgggaactttgacgaggaccagtacagggagcatacagctttcggatttaccctgaccggacatgatgaactggaacggggggcatcatccaatatagaacgtatcggtgctatggaggaactgcataacagggggtatagaatattcgctagtatagaaccgattgtagactttccgtcttccatgcaaatgataaacggttctctccctttttgcgatctttataaaataggattgatgtcaggcaatggggtaacgtatgatccggttgaagcacagaactttttatcggaactacagcaattgcccggtcaacctaaaatctacctgaagaattctctggtcagatttcttggtgtggatagaaaaactcttcctgagaattttgtagagagtaactacaatatgttcggttgaggataatgcacatgggaagtctcgaatgaaggggcttccccttaatctcaattatattatgggtagattgtattcaaaccgggaaagatgtggttcatataccctttcccacatgattgtgacaaatgagattataaataattaaataaatggataacagaatgaaaacgaatgaagagaatcgtggcatactcccgcattggatgtgttgccacagtacaagcattgatttgtcggggagtgaaacctatttgttccccggtgctttctatggaaacagacacattgaaagggtggttcttcctgaatgggctgagactgtaccgagaaatttatttaaaggatgtacaaaattgaaagaagtcacccttcctgccgattcggatattagcgagtctgcatttgaaggatgtgtagctctgaccgacatttatctaccgctttgtattggtaatatagcagcaaatgctttcaaaggatgtcccgaaaatatcaggttccatgtgaattcccctatcatcaaccctgaaaaattgaaacagcatattgagaaggaattaggccggagcatcgaactgtatgatagcaccggtaatgtggtgacagtatcagctggtgcaaaccgggaaatatgtaatttttaaaaatatgaggcagaaagatattctaaaagaaatactggataatctcccgaaagtggattttaaagaaatctacgctaaggaactgtaccaaagactggcgaaagagacagattctgatatgaaaaacctgcttcagtacaaactcttttccattcagattaccgatgagatcaaggctgtcctggtttctgagagagtcagggaagttgcatacggactggggtatggtctggtgatcaatgagggaaaggttgcgtatctgtataataaggtctgttgggaacaaataaacgaacttgacctgaaacattttctgggcaaagcttttcaaaaaatgggagcggacaggtatatggccagaaatgtgaggatagcgaacaggatttatgaacaggcgtgttattccttatataaacagactggacaggatgaaactgtgaccaggataaatctgaacaacctgactcttgtcataggcaatgacggatgtgtacaggaacagcagcattctcccgatgactattttttctatgctcttccttatgactatgatccgaaggcgtcatcaccgatgtttcagaagtttcttgatgaagtcctcccggaaaaggatgtccggctggtattgcaggagttcatcggttgctgtcttaatcccaatatcaaactggaaaaggtgttatgttgtgtcggttccggtttcaatggtaaaagtgtgttttttgaaacgatgcttgcaatgcttggtgagaataatgtcacttcttataatataaattccctgtgcgatgataaaggttattcccgaataatgataaagaacaagcttttgaattacagcagtgactttaacggtaaaatatttgccaatggtatcttcaagcagcttacgagtggcgaaccggttgaagcaagacggttatacaaagaacctgagattgtaaggaactatgcacggctggccttcaattgtaattctatgccttccagtgccgacacttctttcggattcagaagaagactgctgcttattctgtttaacaagaagatagacaagggtaaggctgaccctgacctggcaaagagactgaaaaccgaattacccggtatcctggtctgggctataagagggattgggaaggtttatcaggaacgggaaaaaactcagcaggtcttccactcttgaaatcctagaacaagcgtacaaggaagatacggatacagtggtaatgtttctgagtgcccggaaatgtaatcctgataatgataataaaataggattgacttccttgttcaatacgtatcgggagtattgcaaggataacagtttaaagcccgaaacccgggagaatttcaagatgaaactgaagaatgaaggttatgtggtggaagaggataacaagaaaggagtcaggataggcataaatggttctattattgattctttaccattctcctaaatcatttctctcttttccttcctcaagaagcaagaggggggaaagcggaaaggggaaactataaaacctgttttttgactaatttttgaataggtaaaattgaaaaaagttataaaaatacccttttcccccttgttttccccaccatttcccccctttgaggcaggaaagaatgaagatgaaaaaacataataataacatacatatccctataaactataattctaatgatgaaagtaaccgtattcaaacagaaaccttacagtgaggaatatactaatccccttggtgtaaagacattccgaactatggagtaccctcccaatcatgttgatgttgaacaggtcctcaatataatcaggcaggaaaagttgaagcccgggattgatacgataagatctttctatgatactgatacgcaaatgtattcggaacttaagggaaaactgcccgtctgcctttttgccggaatattcgggaggttcagtaatgcagcctttatcaccccttccggtcttgtcactgttgattttgataaaatcccggttcatgccatgtctgatgtccggaatatgattgtacaggatgagtatacctatgcgtctttcctgtctccgggtggcaggggatataagactcttgtgcgtgtcgctgataatatcgataatacaagctacaatgagtatcttgaagccctgaaggaatattatgattctctgttttgggatgataactgtaagggtatatgccgtgcctgttatcttagcagtgcccccaatctttatatgaaccgtggtagcaggatatggacccgacgaaagcctgttacttcaactccggttgtcattcatacaatcacacaaccgcatattccaatatattccagtgatgaagtctctaagattataaagttccttgaaggcggatttggtaaatttccgatgatacctggcagcagacatgaatcaacttttaaaagggccagagaattggccgaatggggaattcctgaaacagcagcttatgcgaatctctcaaaatatatagctccggatttctctgaacctgaactgaaacgtgaaatctggaaagcttataagtgggttgatgacagaggtaaaatcggtactaaatatagaaaactttaagattatggactatagaaaactatttggggatatactcaatgccattccccaatcaattactccaaccaataagaaggggacgaatgctgaaatctgtgacaagatacagcagacggcaatcagtatcggtcatcctttccaaactttcagggaccagtgtgtttattgttacaccggaaaccattgggttagtattgatgactttgatttgaaaatatttctcagggaagctttgggaatgatgacaaataatatggtagaggcctcgcaaagggaagtggtggaagggttgttcaagcagtttccatacacggttatgggattgacggtagaacagaacaaggagaaaattaactttctgaacggtacgcttgatcttaaaaacgaaagtctggggcaacattcttctctggattatttcaggtatgttcttccttatccctacgccccaaatgcgacgtgcccgatgttcatgaagtatctggacagagtattaccggacaaggacgctcagaaggtgttggctgaatatattggttggatctttactccattgaaactggagaagtgcctgttcctctatggctccgggaaaaatgggaaatcggtgttcgtggatattgtcgaggctcttttaggcaaggagaatatctcccatgaatctttgtcggacatgtgtggtgagaatggggacagaagcagggctaacttatcaggaaaattgctgaatacctgttctgatgttgctccgaatgctttctctggagatatattcaaacgtatctccagtggagaacctatcagcacaagacagttgtacaaggatgtggcgacactgactgattatgccaagatgcttttctgcctgaatgagcttccgaggaccaacgacaaatctaacggatatttcaggagatttcagattgttcccttcaaagtccagatacccaagtcggaagtggatccgaaactggccgagaagattgtttctacagagttacccggaattatgaactgggtgcttgaaggaaggaaacggttaatcactcaatcgggctttactgagtcttccctatgccagaaacaattggaggaatatcggtatggtagtggagtacggaagaaaatagaactcattctgcctgaaggattcaaattatagaagaaaaaaggagactgaacttaattgctcggcctccttcgatttttttcaatccaattcaaaatttttagatggtttgaagtgaggaatatcataggccggaataattatactcatatttttcccaatattacggaccaccttctcagcacggtgttttactacgaaactgccgaaccctctcaggtacacatctcacctttagtcaatgttcttttaacactgttcatgagtccttccactatctgaagcacttcttttctgtccattctcttttcaaggatatctcatttacaatttctgccttagtcgttttttatctatttttagggctgcaaagataccgagagtttattaaagagaaaatgtccggaataaaatttgttcaacgacacgttttgtcgcttaccttcaatatctttgcccataataaaatcaaattcataatcatatggggaaaaagctggaaagattacagcgtatgctggttatcatcaataaattgaaagggcttcaacggtatgtaccccgtgaagaactggaaaattatgtgacacaccgcatggaagaacgtggtggaatgcctgtagacctcagaacattgcaacgggactttaatgcaatagaagagatgttcggcattcgcatctgttttgacaagaaacgaaacggatattatatcaatgaagaggatggcacgaaaaaagaacaatatgaaaggctccttctcaactttgatatactgaatgctttggatacctcttcaggccttcatacttatgtaattgcagaacatcatcgtccggtaaataatgaatatctgccacttctaatcaaggctattaaattctcacatcctataacttttaaatatatgtatgtccgggagaatggaaaggtgcgtgaaaaagaagtactgccacactatttgaaagaagaccaataccgatggtatcttcttgcttatgaagaaaacgtattgaaaactttcagtgtggactgtattattgcccctcagatattgtatggaaaaacattcaagcgcaatatggacatagacataaacagcctttttaaagattgttatggcatttggaaccagacgaatattcctatagaagagatcgaattgagttatagccctttggatggcagtttcttgaagtctgttccattgcatcattcccaagagatcattgtagatgatgagaaagaattccgaattaggctgcatctccgtattaccaatgattttgtgatggccctgctttcaagaagccgttcgctgacagtcatcaagcctctacatctgagggagcaggtgaaggctgtctatgaagaggcactgaaaagaaacagatgacaaaagtcgtttcctgaacatacccctctaaaaaccaaagaatatgaacaacaattcttactggagcagaagtaatcttctgaaaggcacaggcattctttgtgtccttatcatctttggatattacgcttatcaagacgccatgaacagaaacatgctggaaagaagcctgaacgaaaacgctgccccactgcaacgtgactttagccataaatcttctcaattacgacgtaccatacatggaaatacgggttacaaggatgtggttggaaaaactcagaatgcagaatctagggacttaaacgattacgacaccttcaacgaacatctggatgaatatcttgaagacccggaagatgaagtcacttatccgcctgaaatctataatgcactgatagacgatacagaagagttgatgacagaataaattgattaatacaaaatataataatatgaatcatttcagaacatcccgtacaaaagaagcatttttatttaaagatgcgaccattcttacctcatttactgttatttgtcctatattggggattcttctcttatggctactgcaaagacgcagcaattggtattatccatttttcctgattggcattctattgttcatttgttgggctactttcatagaacggcattttgacattgtatatataccatagttttgccagaagtgaataacaatatcccctttgagtttgataatcaataaacttttttatagctttgcaaagtcctgacatgactagttaggacatacatagtttattgatgaaagtgtagtttttatcctttgctaaaaagtctggtaaactttaaagagtacgaaggatggcaatcacactcatcacttgtttgtatatgcttatttgagttatatacatcacaagtgtggggatattgtttatccgtattcaggctttaccagacgcctttagcaagatagataatgaactccacactttcttttataattattaaaccggaatacccaaaccattatggcaatatttgaaaaaggattaagttacaacttcatggtagaaagaattgccgaagcaaaaggtaattactactatgtaatagtaattgataataaagaatgttggataaaaatgctcccttttgaaatatatcaaaacacaaagaaaaatatcataagatgtgagtatagaggtgttgattcatatggttctcatatatttatagaagacaagctttctattttgtatgaattgtacaaggaaaaagaagaatatgattttaactatgtaaaggaaggtatagatatggaaggaactcatttttctgtattaaaagataagtatggactagtccatcgtctatatgaaaaactttcatctaatcagaaaaataaagaaattccaatgaaatgtagagtgaattctattgacaaaatacaaaaggcactcatattacaagtaatagaagataccaatgccaattgtgtggaaactaatattcaaaagactaatgatataacaactattgcatggatagacgaaacaactttatttaagtctatcaataaggaagaacttatagacaattatttctacgatataatccacctttccgaggacatacatttaaaaaatataataaacttataccaaagtaaaaacaacaaatggattgtgcactatattaattattttgataaaacacacaaatacatattaattcagaaagggaatttatatgaattagcagaatttgcagatctaatgatttgtttaatcaactggacacgtacatttaaaatcagtaagataaaaaaaattccccaattaaaaaaatacgaagggctacaaaaagcaattaaaattcttcagacaaattcactgggtaactataaagagaaccttatttgcactgaaaatattatttctgaaatgtcaaccttatttagcttatttgaaattgatccttgcttttttagcgaaaacttctctttctatagagaagtctgtaaaatactgtataataatattttaacaatcagttcgccaattgaagcacttcaagataaaaaagaaaagtgtctaaaagcatttcaagggatattagcttacagaataaaaacagaacgaaaacaaattgcaaacaaaatcatacaaatatatgatctttcgcttggaacagaagaaacaacaagcagcaatatctttagtcttctatattctttactaaagaatcctgaatgcataaatagtaaaaacatacattcatacattgatatgcaaccgcaaacattaagtgcgattgcttgcatcatttatggctacaaactacttgagaaaaaggaagactctaaaagattgctaagtgacatcaataaaatgttttatttttcggaaaaatatgaaaagggtagagttgaagatgaatattttgaaattgaagatatagaagaagagacggaaaagaatatctattcatccgaatctacttccaataaaatcagaacaagatcaaacgaaaatattttctttctaaacttatataaagatggcatgtatattattacaaacaaacaactttttgaaaacaatattattaaaagtatttccataaatcccaatatagacaaattcatactacaatgttatgcacatggaagtgtcaataaagtgcctgtcagaatattgcaagaaaaaaagagggaaagaaaatacctcaatggatgctattcacaagactgcttaaaagatatatatgttattagtgaagaaacatacattgcaactctttcattatataataatgatgtatttataaaattatattccacagaatatatctcagaacatttatcattaggtttaaaaggaaaccaagttgtaggtaccaatgttgattctactgaatattttttgatatcctccgagcacattgaccgactacctaaacgattgatatacaatacgcccactcctcttgggaaaaatatcaagaatccatattatgaaaatgacattttaattttaaaagaattagaaatactaaaagaaactatttaaacaaacatcaaaaccatgaaaaattcattcaaactttttgatcctataagggattacagctctattcttcctgatattcctggaaattatttgattgttctacggacttcttcgttacttcctcaaatagaggtggctcccgaattccactatatagattataataacaaccattacccaataatatacactggaattagcactgtaagtattagaaaacgtgactatcagcagcatttcataggcaataatgccggaaaatccactcttcgtaaatctcttggcagtttaatgggatttcctaaaattccaagagataagaacaatcctgataatgggaaaactaaattcaatgaaaacgatgaagaaagattgtcacaatggatgagagaaaatctattattattttatagtgtagaaaacagagaacaagaacaaatcgaaaatcttgaaaagaaacttatcaacgactataatccaccattaaatatattaggaaacaataatccaattaataaagaatatagagcactattgaaaagattgcgaaatagaaccagtcttaacagttaatttatacgtaatctaatcattttatagagttagtaatacatcttgtaaccagtttattttctaaaaaacaagagatatgacttggacagaattgaaaaaaacaattatagcagagtatgacagtcgaaatttaaagtcaagagtacgctacaatgccattgaacgaattgaaatcttcattgagcagcaccatgctcaagccataaaagaagtaaaaaaattgatggttgtagacaaacaatgcctgaaaaaacaatatgccgaacaaaaagggaaaagtatcagtggagcagaaagtagtgtaattgatgaaatttataatcaactttctaacctgtaatacttatttcaacccttacaaaactgaaacctccataatgtattgaccaataaattaagtgaatatctattttatgataacaccagaagaactaatacaagatttaatagatttttatggatatgaagttgatttatcttatgctatcaactacatagatatagtggggcaatatgcagaagttgacagttttcatctatggctgctagatttatcaataacatagatccagaataatcatagagcttgtttaatctctgtttgaggacagacaactcattacgttacatccacccttcacaaaaaggagagactgaacttaattgctcagcctcctttactctttttattacaaatcatgaattaaatcttccttaatagcattgtaaagaatccacttattttcgggaatattttctgctgaaatactgaacaataacagataggattctggaatttccaaagctttacatattctgataattgtattcttttcaggaaatgattctccttgttctatactacataaagcatttgctgatatatcacgtaaattttcatccatatatgattatcaatgacttacgttctttgttatttactacggttcttcatcagcttcaaagaactcgtgacaaatataattattttaataatacaattaaataagagcacaataaaagtgcgttactagaatccaatgagtgtattgaaatgagtgttttccttaaaaagcataatgtgtgaacactcctgtttgtattgttttatgaaacgtaaccgtcctcttcctcccttgcgtttggaggagaaggaactgaaagtgaacctaggtgaaggcaactttatctttgtgggtagtagtacggatgaatgggcggctaatgtcccatcagagtggattgagcaagtgctggactattgtaacggttttgataactggtatcttttcctagtcaagacttctgcccgttttctaatggtgaaatcacctcttttgtttattatgtgattaatgttaacgtttctcctttttatcctttattccggtactctaacggagtcattcctgtgtatcgtttaaagtatctactgaaaaaagaaatattaggaaagttcagtgaatcggaaatctgttgtatggaaagttttgagagttttagttgggattttgcatccataattaccatgtatgaaatgaagtctgtgcatgtttttcctgtaacctgttttactattgtgcataaatatacttgagtaactcccaatttctcagcgtaccaggctactcttttattttgtatgtaatggtgaaatactaactgtgcgaaagttcggcataattgttcatttttcgaaagagaaaaggtgtcagcttccctgtgtttgtataatatggatatacctgtatgtgcattcagataaatattgtatgtaacccttcttctggtttcttcatccatagatgaatatagttgttgcaagaaaatgaaatgagtttttatcatttttgcttctgcctgttttaaagccagtttggcttttcctagtgctgcatataacgtttcaggtattatattgtccgagttatgatgttccatgtactgttgagagaatcctagaatatggaattccgaattcgtttctattctgtggatttgcaatatgcttcccggagtaagtattaccagatcattaggccttgctgttattaagtttgtattgattgtggcctctatttctccttccatgcatagaagtagtatttcgcattttaaacgtactggatactttaaatatttttttaataactcccgattaatgttggtgtgtacaatccagtcattagataaatctatttttagaatctcattcttcatgtttcagacttttggcacaaatataaacattaaaaataaaaaatgatattcagagtcatttttatatacattacatcgtgttttcttagttcattttagtatattataaaatagaataagaagtatagataaatagcaactgatgcttgctgatgattttaagaatggtatttgggttgatatttaagtaatacgcataagttactataataaatgcgtatgtttttttaatgctatttggttgtatagtaattaatattatattttacacttgaaatcaaaaataggacaaaaaaataaaaaatagatattgatattaacattaatccaatttaactttgcatcaaaatatataaaaaaacaatataatataaaattatattattggggaagctatattatagttgttttattcttgtaaggattttaaaataatcattgaagaataagaatgtgatctaaaatatattcggaacaactattgaatgtttttacctgtttcatagatattatatatgaaaatatgtgagctttttaatcttagaatggtaatgtaataaagaatacaaagtaatgaacatggtaatgataatgaattatataaagatattggagaggacaaatgtaagcgacatttgtagttcttttgttagaggtggttttgtagtttatgaacattctgctgtccagttaaaagcgttgttttctcacttactcatgtatattttgtgctcatacaaatttccatacaaaattattgcgaaattttgtatggaaaatattgacaatgtaagggccccaaaaatgggataattattgcatttgttttatgaacttaataaaagtagtagtaatatgaaatttaaataccatatagttttactttttgctttatgtttctgcttggaaatgaaaagtcagacaattgctgttaaaagtaatttgttatatgatttaacatcaagtataaatgcgggcatagagttggggctggcccccaagtggacattggatgttactgggcagttcaatgcctgggatctgtcgcataataggcgttggaagcactgggctgtacaacccgaagtgcgctattggctatgcgaccgttttagtgcgcatttttttggatttcacctgcatggcggtcaatacaacatcggtggaatagacgggaaagttaaattcctgggtactgatactcggaaactgaaggattcccgttatcaaggctggtttgtaggtgcaggcgtagcatacggctatgcgtggattctcggtcaccattggaacttggagacggaaatcggtttcggttattcttatacccgttatgataagtttcggtgtgcaggatgtgggaaaaaggtagaaacaaacaaaccacatcattacgtgggacctacgaaagcagccattaacttggtttatctattttaaattgcaatgaacatgaaaaggacgatattcatactggcaatcctgctgggcataggaaatatgttgaaaactatggcgcaaagcactagagacatcacacccggtgtttccattgaaaatttcaacatgaatcgtgagggaaaataccttaccgtggagataaatctggatctaaacaaactcaatgtggatgcaaaccgtgccgtactgctcacgccgcgtctggtcaacggaacggattcgctggacctaccctcggtaggaatttacgggcgtaggcgatattactattatgtacgaaacggtataggaagtatctcgggggaaaatgaaacagtttatcgtgcagcgggtaaaccggacagtgtggcatacaataacctcgctgagtacgaagactggatggacggggcaacgcttaagttccaccgtagcgattggggctgttgccacgagatattagcggaatacgaaggcatagtaggccgccatcgtgaagctttcttcccggaactggtatttgtgcagcccaaggcggaagtcatgaaaagccgttccctgtccggttcggcgtacatcgattttccggtggaccagacggtaatctatcccgattaccgccgcaatacggtcgagttgggcaagatacaggcgaccatcgactcagtgcgcaatgacaaggacatcaccatcacgtccgtgtggctgaagggttttgcttcgcccgaaagcccctacaagcacaataccgaccttgccatcgggcgtaccgctgcactcaagaaacacataggccagttgtaccactttgcggacaatatcatccagaccgattacgagccggaagactgggcgggcttgcgtcgctatgtggaacagtctaacatagaccaccgaacagagattctggtaatgatagacagcgacatggaaccggatgccaaagaagcgaaaatcaagcgtacctatccggaagaataccgcttcatgctgcagaacttctacccggcattacgccatacggattaccgtatcgactacaacatccgcacgttcagcgaggcagacgaaatccgccgcatcatggcagagcagccgcagaagctgagcctgaacgagttttaccttgttgccgggaaatatgaacccggtacggacgagtttaccgaggtctttaatacggccgtgcgtatgttccctaacgatgagattgccaacctcaatgccgccaatgccgccatccgcagggatgatttcggtacggcacgcaggtatctcgacaaggcaggcgactccgccgaggcggtctatgcacggggtgcgcttgccgtgcgcgaaggctatatcgacacggcacgcaggtacctgagcaaggcgaaagagatggggctggaaaaggcggcactcacgctgaaagaactggacgaaaggcagaaatgacatccaatcaatcatataaaccaagagagaagaaacatattttcaaacattttaatttatccacaatgaaaagaaatttattattcatgtctgtgctggtatccctgttcttggcgggatgctcacaggaggagattgctcctaacggtgaggacaacggtaacggcgaggccaataccagttatatggccgtaaacctggtgtcctctgatgtgatgggtacgcgtgccgctcaaggttacgaggatggaagtgaagctgaaaaccatgttaccaaggtccgtttctatttcttcaacggggtcggtggtgccgtcaacgttaaacttcaaaacggcagttatgtaaactactatgactggactccggagaaaggggatcagtcagatggtacaaacacaggcgatgacatcgagagtaaactcaaggccacgattgtcatcaataccgcggcaggtgacgggattccccaaaggatagcggctgtgctgaatcccactggcttggataacacttcaaaaagcctttccgaattgaaggctgttgtcgctgattacgccgcttccggagaaaacggtcttacttcaaaagggaaattcgtgatgttcaattccgtcggaggcggaggtgaagacttcagtacgaccctcataaaggatgagaacttgtgtaagacggaggcagatgccatagctcaccccgtcactatctatgtggagcgcagcgtggcaaaggtaagggtcaccttggatgccaatatgggcttcaccgataacaaactggcattgaaggataaggacggtaaagacctcaaagttggaggagagcaggtttatctgcagctcgacggttggggcctgactgccgaaacttccgaaggaaggctggtcaagaaaatcaatcccaaatgggaagggacttggtggtacacggcataccgtagtttctgggccatcaattcaatgagtgccacgaacacgaacaaatatcacagttataacgatatcgaaacttccttcggtacagagaatgtgttgtacaccaatgaaaatgcccagttgacagacataaatggtgcagaagggctggtaaaagaaagaacaaaatttattcttaagggcaagctttgtaaggcaaacggtgatcctttcactattgtaagacaccttggggctcattttgccgatactcagtctgaaacagaggctgaaaacctcatagaattgaaaaagagcatccttggtctgctgagtgccagtggtaataattactattattcaacagaaagcggacgagaacaaatcggtaccggtgaccttcagattatagttgtatcccaagaagagaacgagaacagccagaacaactgctatgtgtatgctcagttaacaactgatgctgccgctaaaacatggttcacctctttggaaggaggaacggctattgaagccacggagattaacggcaaacttgcgaacgaagaaatagtcgacagggctctggtttggaactccggcatgacatactattacaacaagattaagcatctgaatgactttgacggtgtagtccgtaaccacatctatgctataaacgtgacaaagatcgccggtctcggtactcctgtttacgatcctgatgagataatttatcccgagacgcctgaagaaaacgaccattacatcgcggctcaaatcaatatcctgtcctggcgtgttgttgatgaagactatgaattggtgtggtaatatgatccctgacgcccgaaggcgttcctgatacatacaaagtgtgggaggcggctccccgtctcccacgcatattaataaaacagaataacaaatacagtacccgcccatcggtacacaagggaggtgtggccttggaaacctgaatacagaaaacaggaatcccacttgacgagaaaatccggatgcggaagttccgcacaccatatatagaataagtaagatatacattcaagaaagagtaaacgatatgaatatacgggcattgataaggaatgtggtagccaaggtctgcatggcgtcagtctgcctgttggctatgtcgtcctgtgacaactggctctacgaggaagaaggcgactgttcggtgtattaccggctcaaattccgctacgatatgaacctgaagtgggcggacgctttcgcaaacgaagtaacgtcaatacacttgtatgccttcgacaaatctggcgtgttggcatggcagaaagcggaacagattgttccgggaacagcagaaaactattcgatgctgctcgacctgcctgcgggtgactacaagctccttgcgtggtgcggactgcagaacgacggagagcaggacgaatcattctccgtacccgaagcccgtgtgggagaaacccgtatggagcagttgcagtgtgcgcttaatcgtcagcacgatgaatcgggcgcatacagtaatgaacacttgtatcgtctttttcacggcgtgctggacgtgtcgctgcctgtcaacgatgatggcggcagttatgaatacatcatgtctttgataaagaacaccaatcacatccgtgttatcctgcagcacttgtcgggagtagatgtgaacaaagatgacttcatcttccgcattgatgacgagaacggtttgatggcgtacgacaacgaactgctggaggacgagaatatcaactaccgtccctgggatgtacagaatgtagaggcaggcattggcatggatggcaaccgtgccgtcagcaatgtgaaaggtcttgtcgccgacttcacagtcggccgcctgatagagacacaccgcaagaagatgatacttgccatcgacaccaaggacggcaagaaggtggcacgtattcccgtgatggactacgccttgatgggaaaggagtattatgagaaggaataccgttatccgatgaacgagaggcagttcctcgaccgtctggacgagtgcgtgatgactctttttctcgatgagaataacaactgggtaagcagcgtcattcagattctgtcatggcgtgtggtattgagtaatgtcgatattgattaggaagaaggatttgactgatgaaaccgaacattatacatagcattgtagtctgcctggcggcattcacactgccgtttatggtggcgtgcagcagtcaggaagaatccttgccggacaacgttacggaagctgccttatatctgaatatcgccaccataggacaaacaagggcgagtacggcagaactgcctgacaacgagaagatgaaaagcgtgcgtgtggttgtattacacgcagctgatggaacggtggaacataaccgccactttttgttggagggtgcgcaggcacagaaaaccatcttgctcaaggtaacaccgaacgaaaagaagaagatattcctcttcgccaatgaagagagcgtgtccacggtaaaaggtgtaactgtagaggatgaaaatcaaacgctgaccactttcttcaacagttatacagaaggaatgtccggctttgaagctgcggtgaacaacctatacttcgctccggactattcgggcggaaaacccatcccgatgtcctccatgtacgagatagattttcctgaaaaaaggaatttcgatgggacgttctacgtgatacgtgtcgccaccaaattcatggtgaactttatgaattggcgtggtgaggaagtaattgtggaaaatttcaccatagcgaaccataccgataagaactttctgatggcgcatgtcaatgacagcgaacagaatgagctacttttcaacggaaaaacttggatagactggttgaaggaggtttccgatgcctcgtccgaggatgacgattacgccactacggaagccgccggctggttgaaggattacgaactgcctgaacaagcggataaggaaaagacctatacccatgggagggttactgtaggattgccgacagtggatatagacaacccgaataattcaaaaccgggtgtggcgaagaatattcccgttttctacctgcccgaaagcaagagtcccaaagcggaagcaacagacggtgagcaggagtacaccctgacaatcaagataaacggaagagatgaacctttcgtctgcaagttacccaacttgaaggcactcttccgcaacactcatgtcgtggtggatataacaatgtataatagtaatgaaatcatagtggatgtgattccatatagcgaggtaaaccttgaaccggaattcggattataaaacaataaataagtgtatatgaagcattttgtacgacatatcattctctttctgatgatagcaaccgtcacaggttgctatgatgaatttatgaaagaagaaatcataggtgaaggcaaggcaagtatatccgccactttggacttcaaacccatgtcctcgacactgagtcggacacgggctgctggagacgcactgaaggatattagtagtttacatgttttgttgtatgataaagacaagaatttaaaaaataaatggaagatagagggatattccgagtccgatgaaaaccgtacggataaagatgcggaagcaaatccaaatggcgaacaccatacagcggaaacaaccaccaaacgcgccactttcaagctgccggaagaaatcgacttcggcaagtattatatgtatgccgtggcgaatattcccgacctgcttacaaatacgtcatatgatgacgctataaaaacagttgacggactcaagaatattcccctcacatggaattccgaagaagtggcaaacaatggcgaaatgataggcttcttcacgaaaagttccgtgcccgctctgtcggcggatgacgagtctcttgtagtgaatgaaaaaagcgtaaaactccatgcgtggctacgccgggcggcttccaaagtgaccatcgcatacgatggtacgaacctcaatgataatgtatccatctatattatggctgcctccataaaagatatacctaagtcatgcccgctgggaaccgagaatactcccgaccacattgattcactcatacatgatggggggattataaaatatttcgagggagatgttcagcctggtttggacaatttcataacccaatataaagccgtcgttactaatcatgcaccaactctgacatacgggaatcatagggaaacggcagaatctcttttcttctacgagaataggcagggagcaggagaaaatatgcccgacaagcgacaagatgcaaacggagatgggcagttggattatcccggattgccaggcgacgatacttacagattgaaagatgatgtaccctacggctcatacatcgaggttgatgcgatttaccgttcggagaatcttggaaaaccgggagtcggaatcataaaatatcgtttcatgctgggacagaatgtggaaaaagactacaacgctacacgaaactgccactacaaactgaccttgaaatttaaaggatatggtaatgatgtagattggcacatagaatacaaacaacaggttcttgaagtgacagaacctaaagtgatgaattatcagggaaaggttttcataccggagaatcgtccgggaactgctaattataactatggacataatttcgaggataataccatcacagtcaccagttacatagaggaaaacaacacaatggtgaactggaaaatggaaattgatgaaggcgatggttacaagcccgctgaagaaagcgaatggtttgaaccagtcattacggacggttatctcccttatgtaaagcatgtcacattcaaaccaaaatctttaaacaaggaggaaatagatatagacaagctgcttcaggatgcttcgccaaaaggttcggaggctgctccttacaacctcgccaatccgggacaaataattgctcctgccagtgcaacgataaaatgcacggccaactgctatatagtagatgctccggggtactatattttaccgttggtgtatggcaacgcctatcataactttcagccaaacgaaaatgcttataaatacactggcagttatacaggcgatcaaatcctttcgacgtttaaggattatttggggtatgatataacaagccccgatattcaagacctcaccaaaacggagtacactccccgaagtgcattccttatatggcaggatgagaataatttgattccatatactgttcataatccgaccaatgacataaaatatcttcctgatgcctacggaggcaaaggtggaatcctatttcgcgttgaaaaaggtaatataaagcaaggaaacgccgtgataggagttagtaccggtacaaaagaggccggtaccacaactattccttctgtcatgtggagctggcacatctgggtgactaatttcagttaccttgaagaggatgataaaaacatcgaagtcaccagtcatgacccttcccaaaagtttaaacttctaccggtgaatctgggctggtgttccggccacggcgataaaataaaatattataaggcacgaaagtgtaaggtgaaggttacggccggcacgaaagaagaagtcatagaacttgaacagaaatcgcacatagcctttacacgtggcaacaatccatattaccaatggggacgtaaagatcctttcgtcggtgcgacaggaaatgtacaaaataagcgacggtattattctgttgattggtctgatgatgcgaatccacctatgctctctgcaagtactacacctgatggagatcgctataccacccgaggagctatagatgcgggtgtgctcatacaaaatccgcaaaagtggcataatccacggcgtaaacagaaccttgttccgggtggttatccttacttgagtgacaatgagatataccgcaatttatggcaaggtcgaatcgaagttcaacctggttcacccagcctaaagactgtctatgacccatgtccggttggctatcaggtacctcactatactgcagtttccggctttaccaccacgggagataacaccaacacacctttcgagtggtatgacgtgcgggttgaaaatattgcggattataatgaattaaccggaacatgcggagaaaacgggatatattcaaaaggtttgtacgagttttatatcaatcccgacaaacttcagtcaatcatattccccgagactggctatcgtgactgggatgataatgtatgtgcatatcaagttgacataaatgctcctatcggctatatatggactgcgggaaataaacaaggtgatgataataactcgtataacttcgagtttgcacgcaaagactatgcaggaaacagttatatccgtccgaaaaactttttctatccctgcgacggtatgccgatacgcccctgcgtttatgacccccatagtataaccacgccttaatgcttgtagctatgcaggatgtcaaatcacggcatggtgctacgttggaactgtgccttactactaatatggctgcgaaaggaatctgccaacaagaggagttggcaagtttcatagcaatcctcgcttccggcaaacctgaagatcttgatgcatattgtggcaaagacaaggttattcgcatctacaacaattttcaactcggattagtcggaaatacgatgttgacccttcctgatggatatacacttgatggtatgggacataacttgacagttaccggtggaagtttgacgattagcggtgatgtaagtgaattgtgtatcaacgggaaaaaacaaaatcaaataaggacagccttaaaaaagaaaaaatgcaaccggaccagaggttgcaaactggagacggaagcgaaataccgcccggctttggagttatatgctactaccgacctctccactgccgagatatgccgacagtgtggggtttctctcaacggattttcccgttatgtcaatacctactatcgtcatttgatgctggaacataatggtataaagtgcagtcaggaggaagcaggcgatatcaagatgaaccagcggcgtgggcagcgacccgaaacccatgccaaatacaaggaagctatcgcggcgtgtgacagcatggactatatagagtacaacgtatcgcagatagctcgtgagttcggattgagcggcacgaacctcggccgtcagttgcggacgcattatcccaaagtgctggagtttcgcgaaagggcacggcaacggttggggctgggcgacggcctgccccgaggcacacgcctgtggtgcaaggagcagtatgccgaagcggtggagcttctgcgtgccgaccgttatgtcacggtgcaggaggccgccgaccgttgcaatgtatcctacaccggattggaacaacacctgatattctatcacaaggagcttgtagaaaaccgcatcaagatacgcgaacaagctaccaaacagcaacgcaagggcaagataacgggacgcggaacgcttcatgtcccgccccctgaaacaatcgagaaatatgcggaggctctccacttgtaccgcactacacccatgtccgccaggaaaatagccaagcgaaccggcgtgtcgataagaggtttctatgactacctgcagacctggcacaaggatttggtctgtgaacggaaaggcatcccttacgaggaaggcaagcccgtggattggtcatccgtacggaaatacaatccggacaccgccgccaaatatgctgatgccatcgcccggctgaaagaaggcgggctcactatggcaaaggtcgcggctgagtttggcctgcaccctgaatgcttcaggcaatacctgaaagagcacgaaccggaattgcacgcctgtctgggaatgaaaaaaacggagaagggcaaaatggtatcgcctaaaagcatggagaaatacaaggaagccatacacttatatgaaacgacctcggaatccttaaaatccattgcccgccgtttcggactgaacgactgctcgctgggacaatttatcaaacgccatttctctgaacttatagaacgccgtaaacagcaggaacaagtaaatcaatcctctataataaactgaacacattcaatctgaatattccaattccacacgaacggcaccggaaactgctgcaacaaatgaaaaagacagattaaaattaccctatattatacgaatagattcatggtgtatttgtaaatctgtttctttttacaccatccccaacgactggctaaatgttgtgtaatctatattttcatctgcctatggtcaccgatttgaagaaacacaaaaatctctccctttttttattttcgctgcatgaattttcccttttttattattgtatacaatacaaatcaattccttactttattattgacaagtgacgaacaagttgcatataagatttattattgttgctattctgttactcaattgtattcgtgttttattatgtaaatgaatatcaatgcactacgatatatatttattttgaagaggtacaagtagcatcgcacttctgaagtaattttgtgtactaacagaaataaaaagcagagaagacagctatctctaactatcttctctatttctcttaaaacatcaacttcataaccactttctccggttgtgctgtaatcttaactctctttacctgatccgccccaagcattacagccgattttttataacacccaatgaattctctcttcggcatgaaaaacgtgtacccgaaaggaacgcctccccagtaatccggcattctgaaaccattaaaactatgcccagtaattatgttggcgtcgatgttatagatcagttttggatcataattcagccagtctatttccttctccctatatttacggaaaaatgttagttctaatgttttccccgatacttcctttaaccggaatctgactccaccagcattaaaaatcttatccagatccgcctgaacttcattttcaacttcattgactcctagtgtacccaaatcatacactttgcccgttacaaatattttctttttcatattattctagttttctttctattattattaatatttctccttgtccgtcagttttgaaacttagtttctcgtaattaacaagttggcataaccgatcctcatatgtatctgtcagccattttaggctaatcaatgaatgcccatcttcatcttcatataattccctgtcttcatccgctatatctgtcatatcagaggtagtcagactgaatatatgagcagccaattctatatgtacataattagcatcatcagtcccatatagttgagggggatattttatctggatgaatactgcattctcaaaacaactgattctgtgtcttaccggaatatcagagagcccgtccattagaagctcgactatggggtaatctacttcccgtatatctcccgtataataacgtttcatcgtttccactttaaaattggctatcaaagacaagtcctgtattggcatctttgctagtcgggggtataagataccgttctcatcaatatagctttcggaatcagtgcatttcaattctttatctcttgttgttgaaaatctttttactttcatactacttagttttttgtgatttaataattaaggttgtattataattctttttcagatattcctggagttttccatatctgtctgctctacatcttccacgtggacatagaacaaatatttctttaaggcttatttctaatgttaagttatagtccgtactatcctttttattcaataaagaagccagttgaggaaacttttgagataacgctgcaatatcatcgtggaatttattcgttgtctctttcgaatcggagtgtgattctaccggagtttttggtatgtcactacaatccttgttgagcgaataccagagttgggatgtgtctgtcataaatttaagtattgtttcatagttagggatttcaaggcttcgtagcggagtttcggcattttttggggtaggagaaaaataaaaaacgaggtagcaacttaatgatacctcgttaatctttaatcaatccataatataactattcgaatggagaatcatcttttttctcttgaaatattaatggatcacttccttcttttataagttgcactgtcaaattgtccaattgctggttgtagactatagtgatattattggacatgcaattatgttcctcaccacctgaaacttcgtacagatttgggttcttattgaagcctagttttataggtgttacaacctgaaaatatgttttaataaaattataattattatttccaactaatgctattaaacgtgtttttaataatggaaattctaataaatttatatcagatggatatttgcccacattcttactaaaaaaggaggataaactatttgagatagaagatgtatttgacttctgataactattaaatattatatctgaatcatttgttgctgtagtttcactatataatttaaatggcatctttacccctttataattcgtaaaagtgccggaataactattcaaactccatttaccttcaaatgttcctgtattctcccccgctgaattatattccttcaataccatgtaatcgttggaattcatagaaccggataattccagtgtattattactgccgttttttacataataatagcttcctgatacattcttgacatccatatagatttgcattactattctatatttatcgttaatcattcctttcaacatgatgttattagcggatttttcattcgataatatattcatgtgaacctttagttgtttacttcctccttcggcatatccctccagagtattgccagaagtttggctcaatttcattaaaacggtttctttcctattattcaatgtcatatttagaatgccgtcattttcttgtttccctttgatttccatctccgttccataacgaatatttttatactgtccggtaatgtttcctgtttcatcgagtaaaatatccattgtaataggaaatcccgccatatcgcccttgcaatatatctgcctgggtaaaataataagaggtgaagaattttgccgttcactgttagaaatatgtaagtcggcttcctgttcttcaatatttatatttggtgttttgtcttgaaaataaaggagctttttagtgtaatttatttctttttccttgatttcattttttttctttggaataaagggaacctcttctttcaaaccgttaaaaatactccaagtgttttttgtgacattaagtttgattgtattcggataaggtgaagcgttacaatagtgtaagctggcagaaaatgaaacatatccatgctgtttgagctcttgtcttagatatttcagacaagactttaccgcttttttattgtcgttattttttaaaacagatacaatatttaaataagatgatgtaccgccatattctttaggaacaagataaagcgccatttcatcagttccactttgcttggcagcaagtatacttttgattttcagttgattttttagtttggatttccctttgtcacttttttgaatttgggcataaacatttatgactcttcccaatttgtcagtctcgtataaagagtttcctattttatatcgtttctcagaatagggtatgaggttcagtaaatcgatattttcgcattctatatctgtttcagaagtaattcttcctattatattattattgtatactatgttggaaatattattcgtgctttcaaatttgacattctttccttcgataatataacttttgggaaatagtcctctatgagagtctgctgttactccccaatataacaaatgttctggcattgttctcatgtttgatgaaaaagagtttgagtaaacttgtaatatttccgggtaacgattcaaaagtaatgctatttttctgtttctgttaatgtcataaagtaacgtatctttcactccctctatatcaagttcctcaatttgggttatcaaatttccgtccaatacctctttaaacgaatagaaccgacacctctcctttaaagagtcgatataaacgtaaaacttattacaaatggttttagttccaaggtctgcaagcctcatattattcgttttattaagaaaagagtatgattttgctttaatttccgtttctacgagattataaatattctgtgtcccttgattattcaagttggttccgggagtgataatcttatttttataagcctcattgtttaatttatttagcctggacgtgtcgaaccgaatgtccgctatctgctttaatatatcattacgttcagactccgccccttcttcaaccagccatttgactatccctgcccattgtgcttttgccggatatgccatttgtaataatatacagcatattattatacttttaaaaattattgaatacatattccttgaattctttttggtttatatgatagttcctttttatgtcattctcgatttccatgcaatatttttcaattgataactccaatgacgtcacaatagacaacatatagtcttttcttaactgaacttcttgtttggcttcgtcagcaatagaccccatgtccaataatgctttaccgacacctgcccaatcggtgaaaaagcccagtacgccagaccatgtagacgttttttcctgagattccagaagcttatctctaataccggctatctcatggaagtaactcatattatacttgtactcaaaagaatgtagcggagaaaagtgtacaatccaattaaaattattctgtcttccgacttgttgtagataaaatgtccgtgtcgaattgattctttgacaaaatctgtcaacttcctgttgcaatatgtcattaaattcctgaatgtctaaatatgagttcataatattatcgaactgttttgtcatttcattcggatattcaggcaattctacattggaatatctttctgcaatctgaccaaaagagctataaatataatttaaagctttataccttaatatatagaataatttaggcaattgcttttcctcaatatcacaataagtatttaattcatttttaaatatttgtctgatctcacttttcttctccaccttttttctttttatttcttccataaaagagaatcctgatttacgttcaatatatgaaagttccagataagataatgaatccagattttgttgtatggtattgtgtatatataaatcaaccagcgtcttgcgctctttaaaatattgcagatactgcgccagctgttcagccgtcaattgtgagacatattctaatatttcaacttctttatcagcttttattctttcaaactctttattgaggatgtcatcgttgccggatagtctgcaaaattcaaatatttgttcatatgtatattcattataatcaatcccaataaacaaaaagtcctctattttcttttttaaatccggcgctgaggtatggaatgatattaatgtgctaatatcttgttcaagataggctctgtcaatagcctctgtatctgttccgcttattttctgactataagcagccattgatgctgctataaatataagcaatatgcatgttcgtttcatcataacctcaaatccgcaactacgcgcctaatatgatacagaagcgaaaagaatctgcatcgttagtaaaaagggggcacagtgcatcgaatgtcaccataaagacatataaatgccccttaccccaccatgcgacttgaggcaatacgcaaaatcacgactataagttgtcggtgttatccaaagtcattctggaacacattggcataagcattgttgcatgaatagatattcagcacatacttccttgatgtcctgacccatttggctggcacagagatgaacttaaagacaaacgtcttgatgcggcttgttgctttgagtccgaacctcttcacgtcaagcctcgccatgatgaatttatagaagttgcgtatgagtgccataagcagaagaaacaccgtgttttctcccataaaggattttggaagcctgttccagccgaatccgttattcatatcatcgaagatgcgttccttccctccacggaggttatagaattcgacaatctctttctcggaagactcgtagtcatttgtaaggatgcagcggtaggtgtattctccttcccacaggtcgagttcgccgtctatccgcttctgtctttgaatcacaagacggtatgccttccctttccatttctcgatgagaatggaggccagctcaaactcaatgccattgatttcctcagttttccagcctttgagagcaaaggtgtcattgtagatcgaactgcagcggttagcacggatatagaaggacttgcagtgtttagcaatctcttccactatctcttcagaacacgagccgcaatcagctctgaaacggttgataataagcttgttttgttcaaacctttcaaagaacctcttcagcgtgtccttctggtggaaacggacatttgtgttgccgtcgctgttctcaatgccgacaatcaagttgccaataaccgccacgccagggcgataaccaaggaacttcttgtatgtaggcttcgcatcaaacttctcagcctctatgaactggtggtcgaagtcaacgtcatacccctcgccctctttcagctgccctgtggacaataggcaattgaggagcagtgtattcagcttgtctgccgtgttgaagtcgtaggtcttgccagtgtcggatgtgtaggaaatgttatcctgggtcagttcctttatggctctaagaatcgtgtcggcactgcatgtgcgaagtgtcggatgaagcgaaaggtggtacatcagatgagtggtgacatcctcgatgcatgagccgccacaaaaataaacgctcataagcgaacggatgatttcgctgtattgataaccatacagcctgcatctcataccgagggttgagtcgattacagatgagagtctggagtcaaattgctccattattgaaaatattcctccaaaaggagtgagtttctcggatttaattgctacctttgccatgtctgtcgggtttgatacatattttgatttgcaacactaagataggtgaaaaatctgacatggcaaattcctgagcaactttttgttgctcaggtacttaaaaagttatatttgtaatagtgttgcggaattaaggcataactcttccaataaattatatttcacttctattgttacttacttttagattatctgcatttcttttgaactgatattgaaatttgaatgtaagtaaggtaatccgacaagaaaacgtaatactacagcagtgtcactgcggtaccatggcaattatctttacagttggtaccatacctgataacatcgccccaatgataatacggtgatatcatcctttgccttttgctttattttcatattcctctgctttcttaaggtctttggtacatccttctccatttttataaaaataggctacgcttttacaagcgtcaaggtgtccctgatcggcagccagtttataatatataaatgcttgctggttatctttctctacagattttcccaaataatatcgataccccataaggcagcaagcttctggatgctttgctttgagcgctttttgtagaaactcctctgccttgacttcatcctttggaaataaatctccatttgtatatattgtatataatctccatgcggcttccgcacttccatattcgactgctttaatgtgccatttctctgcttctttgagatccttagccgtaacagaacctaaaatatattgtacgcctaaattcaatgctccattcgcactttttaaatcagcggcttttttataattctcaaaagctaagctatcatttttttccactccttcgcccagagtataaaaatatccaatttgggcatatgcatctccatttcccaacttggcagcttttctaagccaggataatgtttgttgtatatttttttaactgtcattctcataataaatatttgctagattcatcatagcctgagtatttcctctcatatttgcagcttttgtataccaagatatggcttcctgtatattgggagagactcctttgccatactgatacatgtatccaagaagattggctgaatatctgtctcctaattcataggctttattaaaaaattccatagccttaggataatcaatttcatatccttcattattaaagtataattctcctaataaatacaatccataaggttcttccttgcattcctccaatatagtcaatgcttttttataatctttttctatcagcccctctactccaaagatatacaatgaagctaatgtctcttttgcataaggatgtttactctcttctgctaaattctctatcattttcacacctttttcttcatccttctcaataccctttccatatatatagcaacaggcttcttttacctgcgcttgaatacaatcctccttagctccttttttatacaagtcaaaggcttttttttcatctttgtcaacacctaatccagtctgatagcaatttcctaacctgaaacaggcatacccgtcaccatgcttggcagcttgttcatataactctgccgctttctcaaattccccttgcagacgtaattcatccgcttctttggtcttgttgccacaagaaacgagaaatgctataacgactatagttatagctctaaatgcaatttttttcatacttttttattatttagtgagaatgttaatttttatacggttcggattatcttcattaccaaaacttattagttgaatctttatatcggaagatgatttctcatagcttttgatgaaaccgatactttccgtttcatggtatcccatatttatcaattcacgttcaaattccttttggatagtctccatgtattttgtatatttgttttggatgtctatatctagtgagattccatcgcaaatagtattacaaaaatgagcagaaccgtcataatcataagctacgacctctggaaaagacaaaatcgcatttacatctgcatagtctgtgctgaaaagcttagtagatgggaaaagcatatttgccgtaatatcataagcgtgtaattccagttccagtttgtctgcgcaagtctcaggatttagccctttatatccatatagttctgtaacgtctttattatagttctttggagataatatttgttttacaaatctgacaacatcgaaatagtcactttgaacgaaataatcaatatctgttagcagatttacataacggcctatttcttctccagtttctgacaatagataatatttgttacttttgtaaccaatgaaatttgaattagctttatgcaatttctcatatctgaaatcgaccaattgctgttcgtcttcttttattgataatactccccatttttcatctttacaggctataaatatattttcatcacaatagttgatattatcatagttatctcttattattacttcgcctttgttatccatgataccatatccatcttctgtttggaatatgaagtaaccatcatttgcgactttgatacttttatatttatcacttgcttttataatgttttctcctttcctgttttttattccccactcatcatcttcggttacataagagaaatgtccatcattaacttggtgagtccaatattgtatttgatatcccatgtagacccatgcttgagccatttcatcatcaatcggtcgtttttctcctttaagatttatttcaaacagcctatcattttcctttacgagtgctagaccattacagaatatcgttccataggcatattgagcaggaacaacaacttttcctttcgtatcaatatagccgacctttccatcactgtccataaaaacagagatgccatcctgaaaacaactgagagatacatactctttatctaattcaaaaagaatattcccatctttattaatgacagttatacattttccctcttttacagcaggagctaccccatttgaaaatgcagcgatatcaacatatccatcatcaattactttttttatattattgatattataaagttcatatttcccattagctcgttgaacgaaaaagcaatcatccgtaactacggtaggggcatatttgaattcatcttcaattagtacctttccgtctgcagcagagagtaacccccaattgtcattttcccgttccttgaaagggtaatcgctaatggtatctttaggcttactacatgagaacagagatgaaagtagtattggaataaataacattttagtgttcatggttcaatcctcctatacgcctataagtccttcgaagtcagcattaatttgactatacaagaaaagcgtgaggacttgttctgttattcatcaaaatcaagcatcgccaaacgcttagtaggaatgaatatgaagaaacaatactcacgctatgatgttatgtatagatacaacattagctgtatcaggtacatatacaaaacagaatgagcgttacattgtctctatcctcctacttttgaaattggcgatttcgattttaggataaagcaaaaaacgctttctatatctctgaccatttctccggtcagcttttgcaaatatacgtatttttgttcaatgtaacgctcttatatgagtattctttcttcatacataagagaataggagctttctaggcgtaaagatacatggaaaatggcattaagacggagaaaacagttccttatttttattcccctttcagtttctggttcctatagttcctgccctcttcttttttcaggcacaacctcattctgtcctttccgaagtctcctctgttggcattataattattgataaccatagcttctatatcagctttatcaatcccgtgcaatccaaatgtcccggtgagatatgccaatgcattttcatagagcacaccatacctgcataaccatttagctcttgacaggatagactgatgcctgtgaccgtcctcgtaggattcaggatattccaggcgccacttcttatctatgtaattgatcagtgtcttgtctttccatcgtgcctgaaaacaattattctggattatttctgccgaggtatgtgtgaaacaattgcttatgtaaccctgattatagcttttcataggagttgccctcactgacggggaatgctcaaaatggtaaggggtaagagaatcccgttgcggattaatataaatctccggatccgaacttaggaaaaatgtccggctaagattaccgcatttatcatcaaactctggtattcctgggtagagttgttctctaatacacctgaagagttcattatgatacatagggtttgtgctatcatgaatcattgccacttttactcctaatctactcggtgaaaaccaaagtgcatagacatgaagacggtctgcattatcaattaggtttcttttgaattccccggcatcaaggcggctttgaaaatggtcaaaatccagaaccaacacattggaatactccctgagattttccggatcatcatttcggtaatcaaatacgcccgagggagcaatcattggtaacaacttcttcgcctgcttgtattcttcttctgtcggcatagatctgagttttaccgtttgctggaatagttcttgattatccctgatcatccccaggacatagtcaaggttataacggattttactcttggaatcatccgcattattgtagtaactaactgttttgttaatcatcatattttggatttttattattgttattctctctacacataaccactcttttttattggaggtgctatgttcagtatttatggtaatagactggaataaaagtaatgtagatacatagcaagataaacaagagagagaccacttcgtgctctttcctaagtgataagagaagggaagataaaatatttaaagtttttctctgtatcactttgagagacagcgtagcggtctttcttatttaatctataaaacttgtatatctatgatttatcatatttattgcttctatctatcaattctattattatttatctaccccctttttttaacttcttatataatttaactagtttatcgaaaaatagggggtaacttataatgttattaatttctatctactatttctattttcaattcttttattatttatatctacccgcttttttttgatccttatataatttaactagcccatcgaaaaatagggggtaaagtttcaggtattatttcaaaagaacaaaggggatgtagtatctattttatatacagggttatctttattttcctaagaatatcagataatgctttgtatctcgctctttcccgcttgcctctctttatccccaaattctccagataatcaaagctgacctctttagtgtattcccgatccataccgatagcatttctcatatcctcatcatccatagctaatagtataatctcatttttaagattacttcggatattcatgctatccagcctgtttttccagtcacatgattcccggctatgtgacgaactgattaccctgttctcattgaagtacgcatacattctgcctatgaaatcatacttgaagtcatccgtataatataccgtataagtaccaccgtcgtgttttcttatgcctattcttgtaattagctggctgaagaaccagtctttctgattctgtgtatcggtagtggttccataagcccggcgtattctggctgattctatattcggtaaggtccagtcaccgcacattacaatctggtctatatcccggtagttattggtactcttgttatccgaagaaccataataggtaacagtgaacagttccttggggacacccttaagcagtaaagcctcactgatctgttctgcatattctgatttacccggaccgtcgtcacccccgttgatatccttccagcatacgaccagggtaggtttgtttataagcatggctatacgggtggtaaactcatcaaaacgtcggggattaagatttcttctgaacagtccgaagtttattttccggaattcagtcacacagttatatttccggtccacatcaagaagcctgaagttcctggagtccttgaacaaaagatcccctgcaccttcgaagatcagtatatgcgtatttatgtacactcccagagggcacaagtcaacgggatagaatgtgatgcctgccttgtcactgtcggagagcatccatgaatcataatactgcggaatcaggtttaatgctacatcgcgcttaatacggttaattcggtaagactggttgaaaagatcattcctggtattcctgatgaaatggtcgtaataaatcccgatttcttccggtgacatacaaatgatattgcccgtatcattggttttactgaatactcccagtatcgtccggtcgaattccacgaaaggtctgataaaggtgggagtctcgtcaaacaggatataacgtctaagatccggtcttaccattagtttcctgaaatccccgtcaaatgaatctacgggtacttggggacggtaaatgaggaaataattgatcaggtcagtccagaaacgtacatgtgtgattaagataatctttttctccataagaatctctggattgtccctgtattgattcagaaaggatgaacgctccttatcactggatatgatcataacatcactttctctcaatatatcaccataccccaattccctgttcaccaggttagccagaatccagtcatacatcttgcccagttcgtcacgggtatcaacacaatacagaattcccgagttatatttctgtcggatcaggctctttatgctttcagtcttaccgctaccacaaccagaggaaatgatatagcctccgttatcatccgggacatcgattactcccgtactgagttgcattctgaatccgtcgccagtcgaattgggaattatatcgaaaagttctttcatacatcacctccttcctgcgtatcatcaattactacccattcgtcatgatatctttctatcaggaaattcagataagactgtacgtcctcttcatcaaaatagccttcgtcgatatccggtgacatttcttcccaaagtttgaaatcctctctgatctgttctatgagttccgatttcttaattactattgcatccatgtgtgtatctattgtttttgtgttattgctgtatttttatccaaaccacccttagtcttttgtgagtggatattcagggttactccgaaagtacgtagcaggtatttccttaatccctggtaggcttcgatctttggataatccctttcacatatccctcgaaattctttgagggacacattaatgaccagcccttcatgtagatcgtatctctcctgtaatcttttgatatcttctctgtaccttctgggtattctctgtggaactgttttttcgctgacatcaggacaatcccttacctgacggtctgatatagaattatcattcttatctgacaatattatattttttgttttcatacatatatcaagctttcgggggatttgaacagcgaaacagatatttttgagaggtaaggtaaagatcaggcataggcgaattaaagaagagtgaatgaacattatccttgtcgtcccaccaagaagttgtcccggtagcttgtcccacttaggagcgtcccggtagatgtgcataggcaaacctcgctggggataatagggatgtggtgaagtctttttctcttgtttatcactttgagtagacagcgtagcggtctctttctttatgttctctgatgaaggaaaataaaagtgcataaatgctttccttattgagtacaaattagtagtataacagtgtcccagaattgaaattctaatgctataaaatacaaaacccctatcgtaactgacaggggtattacgttttattcattagagaccattgaaaaacttgagagagtttatgtatatgtctaaaaacttaaaaggggtttctgttgactctgctgttgaaatgggcacgaggataatcctgctttcgtattgaggccgattatcttccttgcatttcaaatcacaaattgtttgttttcattgggatgataccaagtatgattttctagatttcatactatgtggtattattatcagagtagtacttgtcccgtggatgtcataaaatcatctaagtgtgttttccgtactattgatggtgacaaaaataataaattatttgaaatgtgcttcatttaggagtacataatttaaggttgccagtcattttatcgacattttttgatgattttaaatcattatttctttgtgaatagtttgtaaatccttacttttgttcatcttattatatacgctattattgtatttcaattgttgatatgttttgtaattacgttcctttgtgaaaaggagattatactttaattatttttatgcagaagcgatgtgaggtaacactttcatcgctttgtttgttatttacggtgtattacgcttcagtgatataataaccgtcccgtcccacttggtgttttacctgatgagtaattggagagagttcatgtttatgaataatcttttattattatccaatagaaatacaaagtttattaattgtgtgttgatttgaattatgattttatttaagaaaataaagaaagctgtattatcaggagtagtttctctgaaagataaaaaaaggagaaaaattagtaaacttaaatagattctacttcgatggagaagtttggtaatgctgttatatcatttttaggcaatattgctcttcacaagtttcacggcttagtaacacgaaataatactcaaccataaagaatatcaattatcaatgttcgtccctatccttaatataagcacatccgtagattctatttttaccatatttccagatgtaatatagtgcatgtaccttgcctttgttttgaatgataaaatcatgtagttgcctgttttcatcattttccacacaagctataatcttcccattgtcttttctctttattataatggcattgtcatattgattatttccctctgctattgcatatccgtgatgtactccataatcagcctgtttcaggcacttgtattgcatcccggtaagtttgtaacatccgtatttttcatacttaagtagcttgacacattcttcgctgaatgttttattagctctgtgtagtctgcaggtgttcttgagtttcttgttttcttttcgtacaatccatatggcagttacaatggtaatgccgataagtaaaaaggtttccatgagagtattgtgatttaagatgtcctgtaacaaaaatattcaatattttaattatttgcaaatgattcatacataaatagatttattccattggatttttgcggaggataaagtttatgttgtttcttaaattcaggaagaagttgtatttttgcttgtcctaaaaataaagtagaaagtgatttattttctttctgtagcatgctctttgtgaaaagggtctcatgcattagattgtttacaagcggtgttagtcgttggattatcatcgctttatttattttctcttatttgaatagtcattattttcaagaggagagattgtctatatgaagaggaagaataatagtggagaaatttgcagattgatttattggctattgtctttgtggattattactattcatccattgcttaaattttaaggttttctgtaaataatgattttttgagtaaaccaacggactttgttttttgtttattttagaaataagagatctgtctattaatttagaatctctaaatattgtaccctttgtgaaaagcgttttaccatttgtcgtattttattgtgcgatgagaatcggcggattcttgtcgctttattttttggggtagaagtaataaatactccatacaatgttaatgatgtcttactgaacggtatacttcagaagttgagatgcatatgatgttttttgtgttagtaatttgcgatatataaatttccattataattttgtgggacataaacatgtgagttgtgaaactcggcaattaaatagtgaaatttagtttttttgttaagagagggcttctacttcaacggaggggtatgaggctcttttcgtgttgatatttgattttcaggtaataccaatgattttctgaaagaggtttttaggttatctgaaaatttagaggttgatatgtccctatgagaaaaatggcaagatataatattgtctatatgatgcgctaaataaaatagccacagtttttattcaaaggatgactttctctatgaaagaaacgttttatttgggagatctatttatgtgcacttcttttttgaattcattatgctttaagaagacagcattcaaagtaaacagcctaggttttatcatcgagtaagctggaggcaaatagtctgtgaacgaagtgagtggtaatatacataactcctgggaggagatgaaagtgttataaaaaagtgtgcaaatcgtgtatcttttataatagaagtacattttttgaagaatattttataacacatactatcctgacggttatgtatctattactttatcccctggctccacctaacccgatcaagtgaatcttttggaaacattcgggtagttgataatctcatcagggggatagcaaaactctaatgttcacacagattttttttatttatcactttgggcaaacagcgtagcggtctctctctttatgctctctgacgaataaaatctcttactcaaacttgcagattattcattttctgcataactttgtgtgtttttcatagtataattggaattgtgaaattccgataataataagaagatgtcatgttttgtaaaaagggcttctagctcagtggagaatggaggtccttttattttgaatggattgctgaaaacatcacttctttatgtagaataatcagaattttccggtataatcccccaataattcgaatagacagccagtgcggataataaagcttccatttgagtcgtgataataataatttgcaggataaatattgacctgaaatcttaatagcctgattagagtagtgtgataataataactttcattgttcttatgatttaagataagatttgaggctgacaaagaaacgttattcatgactgaacctttgaaaatcaccggcattcattgtctaataagcgatgagagtcagcggattcctgtcgtttttttgtattgagagggcttttgttctcattagagatatagaggtcttttcttatttttgggttaactatggcagaaagtaaaggaatgtgggagtgatggtgtacataactccagcagggagatgaaagtggaatgttttttgcaagtcgtatacattttataaatagaagtagaacaaatttagagtaaggttactatgtcccccaatctaagtttgttctaccctcaaattctacaaaagaaataataccagtctccataaacaaacaagctgacctattcaataaatagagtaataagttggcttgtcgctattaatagcataaataaagccaaggcattattgttattatcagtagcatcaaaaacaaaatataaagcaatactcgtaatatatggttggggcatttctttttaacaaaagccgataccatgtttatgtgtgacaaaatatgaatggcaagcagagcgaacaatacaactcctgcccacaaatgaatattgccccaatcgtgccttcccaaaccaaacaagtgtgaactccatggagtaacgctttgaaatctgacagcatgccgggaaggaataactatttctaatataaaaccacttatacttaccaatgccattgctatcaacatgacaaagtctatgataatattaagtagcatcttgttctttccaaacatcattctttatgattgtgcccatggcattcatgttgatgtgcatgggatgagcagcccactcccgaatctataagttttccgtttaaatagtcggtagcaacatccaggatattaccagaacaacctcttatgactttgatgttgtgggctgtaagtacatttaaagcacctagtcccatattccctgccaacatgacactgacttccatgttttccaattctcctgctatattggacttgcatccgcatccttgtggagaaggaattgtctcactacttagaatttgattgtcttgccctattgtcaggattgtgtaatactcacaatgaccgaaatggttatcaaccaccttgtctctagtcggaattgcaattttcatcataatctcatttttattaatgttaatattactaatgcttatgtcgttggagtgacatactggacattctattttacggattttaaatgcgggattgatattattgaataaaaaaccgcatactccgcaacaaaaccattcactgtcagtatatgctactccgccttctattattatagcaacaccacgaaccaatgcattggcaatcttttgccttgcactgacatatattcggctaagtgtcggacgtgatacccccattgaaacagacgcttcctgttgagtcttcatttcataatcacatagccgtatcgcttcatattcttcaaagtgcaagagtatagtatccttatgataactgtttgaagctataggtctaaatccttcaacagaaggcatattattaactttacggatgttctttggacgtggtgacattatataatttattattttcgtccgcaaatataatgaacaaatgctcaaaatgaaagcaatgggtaactttttaacacaacaggtaaggactttgagttatattcctttgcccctcaatataaaactcatttatgttcgagagcaggatgtttactatttatcttcttgccctgcttagtgatttaaaacttttcactattttgcagcaattccaataaactgatgcgttagagaattggaaggatgataggaacataaggatttatcttctgtttgtaatctggacagtttaataagttaggggataatagctcctcattccgttcatgttgcataataagaagtagtctttctttttgtgaatatagaatccaggcttatcataattgttattatcttgtcttcttttccttcctcaagaaacaagaggggggaaagcggaaaggggaaactataaaacctgttttttgactaatttttgaataggtaaaattgaaaaaagttataaaaatacccttttcccccttgttttccccaccatttcccccttttgaggcaggaaagaaactataaatcttacaactttcaaataactctcatatcctgttccatcaatattccccggaatactcttttatattaccggattcgattaccctatacctaataatattcagaaagaaagacaatgatagcaaccttttttcctctcttatatattatatataggatattgattttttttggtagtagaagaataaaaagtaagagaaaacattatacatattctctcttacttattgtttttatagttatttcagattataccttttgattaatatattcacttgtgatgctctgaactgacatccccgggttgttacaaatccctccttattcaatattctggccatttcagacaggcttttttcttcctgcacgagcttttttagtagcgcaaccgctcttttgttattgggattgtcgagagccttctgtctgttggtccggttgctgttccttaccgcccgttccaggttgtccagcaggttttcaggctttcccagcttgataccccttgctttcttggctttcagggattgtaccgtcctctgtgatataaggttcgcttcatattccgctatgctgctgattatatgcagtacgagtttgttagcctccggaaaatcacagaatacaatctcaacatcactttccaatagtttactggtgaaagctacattccggcttaaccggtccagtttggctacaattaagacagaaccgttctttctgcattcctccaaagcttccgtaagtttgggtctgtcagatttcttgccgctctctgtttcgatatactcagaaaccggctttttctcctttaggtaattttgtataatttctctttgtgcttcaattcccaatccagagatttcctgtttttgtgtactttgtctcaaatacgctatataggttgtttccatttttacatttaacatttttttattcgcttctcgaatacccaacgatcgttcagtattcgttaaataataaatttgagtttatgaaaaagaaatcctgtgagaatcggttttctaatatacccggttttctcacagaatcctgattattacagatattcggttatataagattctctgttttcatataactgcagatttctcatacttccatttgtgttctgtccttctttctgacatatttcctgtcaggcctggtgatgggatttgaagtaagtatcttgtataacttcaacccctccatttccaccggtgccgtagccagcataaaggtagccgacttgtccgcaccaacgttatccagaatcttatgacatagatagctgcaattgaaaacagccccgtaacagtattcttcctgaagtcccttgctgttataccgttttctctttttcagccttaccggaaaaccgccttcatcatctacaatacacaggaaccattgcttgggatcatcttcgtcaccgaccagtacagccatgcttccttcctgtaatcctaattcctgaacgagggcactgcttaggaatatgcatccgtttctatctgtccggatgcttctttgtccttcctgtgccacactgagcatgcatttttctctgttatatataaatagtttcatatttacctccttttctatcgttattcatatacataaagcatctcacaccgttccataaagtagctgttggatctcaatgattccagcatccgcctggttttcctcatgacctcggaaagcggcaggcccgtgtattcggagagaaccttgagtgagcactgttgcctgtagtaacgtagcatgaacatcctgtactcctgttgggagaacctgctcctgatatatcttaatacgtccctggccagcctttcacaacggttcaatccccacgggtatggctctgtctcctcctggctgaatctatagaagaaatcgtcttcgggatgaacgtaacggttttcatttctcatctccgtcatcgctttataccggtagcacctgaagaaataggcttccaggttttctatcctttcttcgccgcccattatcttttctcttataaaaagataggtattatgaaagttatcctcatccactatagagaaaaaacggatcttttcccttaatctcgtataagaggatgcaaaccacttgtcaaatcgggcaacttcggctgtgtttccgattgtctctgtttttactgcattattatcctgtttcttgctggaatgtctcaatctgtgagaataatcccttgtaaatatcgtcatcataatctttaattttaaatggttattaaacaaaaaaagaagataccaccgtttctctcattggtgataccctcttcggatattaatcgtatcaatcacactctcccggtcattcgatgaaccaggaatatgccatgtcccttccgttcagtgcctctgtcagtcctaccgatacttccgtagcgtttacactacggcccagaaatgtatccagataactgctcttattggctccggtgatcaggttataaaatttccacatactcagttcaccgttatttccggcaaaattgtcgtcatggatatatgccctggccacgttattgatctgactgtcggttattagtaaccgtggcagttctctttgttgtgcctgtgggagatagttatacagtcgcattctccccagaatctggcagaactggtgttcactcagcatggtatcacccaacgattgcatcaggtgaatatgtctggctacgttgtattgactgaacaggtccagtgtgaattgatacagatccctcgcactggttgcccgtatttcttccttatatccgtctgttgacaggcattgattagtacaggccaggttcaggaacccgattgccagattgaatctctgggctgtcatctttccactcaggttatccctggcgtagctcttgcaaccggtgatacacaggttcaggcggtttccgtttacctcctcgcatatactggggatctcgatattgaagatcatgcgctcgtaatacattgtcttgtcagattccagtagttgatccactcttttgttgatcgcctccggtatacgtcctctgacaatgtgcgatgttcttatctcgggactgcaaattgtttccccgtgataaaagtctctggtcgcttcatagactgattcgatgaaacttggatgtgatatacatacctcgttgtctttggcaaaggtgggtatgatacaatcgttcctgaggtgttctaaagtcacctctgttgtattggcttcaatgaatggtgagcgttttgtcggttgctccgtgatgagcactgcatcttccgcttctcttttccattcgttggttcttgccacccttgtggatggtaataataaattggttgtttccatattgctataatttttaattggttaataaaatccgataaaagaaaaagccaagaggtttatttctttgcttttacaaatattcctcttagcttcttgattcccttgagtatggatgttgttacctcaaggatggttataattacgtcctgtgccttatcataatccattcactagacgttctatgggttctcagttgctacattgcctgtatcaactttacttgcggcggatttacgtttgctcctgccactatacttctctacaagttccacaatagttgaacttgccacgatgatctcagcaatgtatgctgcgattctgattcctttcattaaatgtttcattttctcttgatttttgttgttggttaataatatgttcttttttctcttgtctcttatttatttctgtcatatataagggtttaaggtgaagagggaaggagaagaaagggaaggaaaaatgataagggaaaggagaagaaaaaaaataaagagccgttatcaagactcttcgtcctgacttgactctttgataggctgtcatactttcattatccagactgtagctgtgataattactggtaccgctgctatccttcgaattgaatctcccaatgatcttctaggtattggggtcaacccggaaattgtttaatcttgtttgaagcttatgtgcaccatttagtactggtgcaatctccgtgcttcaatttattctcatctataaggatttcaggtgatgggaaggggaggaaaacggcctgatattatatcttgataataggaaaactggatggtctaaaagaatgactgtaatgatcactgaattcgtatgaattgtaaatatcagagttatatacaataaagaaataatcccgatcactttttatttctctgttaaaatagcctctttctgcttgatttttacttgattattgctacttttgtacataagtgtcgggaaggtttattgaggcatttttaacggtctctcatgttgttggttatacaatagggcatttccgcgatttgattttgaaattataaaaatagaaagcacatgggaacagaaggaattcaggataaatatgtaaatccatataccgattttggatttaaattgctttttggaacagccatgaataaggagttgctaattagctttttaaatgcgctcttgttcaaggaggaggtaatcaaggatgtaacttaccttaatgcagaacatctcggaacacaggaatatgaccgtcgggccgtatttgatgtctattgtgagaatgagaagggcgagaagttcctggttgagatgcagcgtggtgaacagcaattcttcaaggaccgcagtgtcttttattctacttttcctattcgtgaacaggccaaacggggagaatgggattatgagttgaaggctgtctatgtggtgggtatcctgaatttctcttttgataattctgatgagaagtattttcatcatgaggtgaaacttgtggacctttacacgcacaaggtattctatgataaacttacctttgtttatcttgagatgcctaaattcaataagactgaggatgagttggatagtatgtttgacaagtggctgtttgtcctgcgtaatcttgcctctctgcttgaacgtcccagagcattacagaatagagtttttgatcgtctctttgaaactgcggaaattgctaagtttaccaagactgaattaagtgaatattgggacagtctgaaaaatttccgtgactggtatagtgttatatctacggcggaaaagaaaggaagggaagaaggaagagaggaagaaaaaagagagaatgctcgtaattttaaaaagttaggaataactattgatgttatttcacgggctactggactgtctaaagaagaaatagaaaaattataatgtaaatcttgaatatgttattaatgaggggaatatgcggatgattactgtgtattcccttttttataggaatcatgaaagaataatctaataattttcacctaatggttaattagtgttgtatgccttgtcataggaggaaatatgcaggtagaccttatcaatcattttggtgttttcatgggtagtggcgataattacaacttctttgggaattccctttttgaacattagggttataaaagtatggcgggcaaggtgagtgtgtatgattgggtgcagtttcttctttataacttttttcttcgttcctaactagtggtttcttcctttaataagaaaggaaaccgttataaatattttgaggatttctttttattccatttaaacgcgatttctttatggataagcacattttcatcctatttagtcacaaaatgcgtatttccactttttacaggttgttgttattgtttatatttgcagtgcaatacattaacaaggtgaaacctttttttatttacatattaatttatcaaaccaaaatgagaacattaagattaattggattggctatcgtagcgatagtaatgagtgtgaattttgctgcttgttctgacgatgatgatgatttcaatactgacgatttagtcggtttatgggaaggtgttacttctgaatttgaggaaaaagaaaatggacaagttgttgaccaagacgatgcagagaatatagatgatgaacgtatcagatttaattcagatggaactcttacatcttattacaagggtggtagcacttgggtaattgaagatgaaggcacttggagtgtgaaagatggaaaaatctatatgcgtggcgatggtgaagaagtagtaaaaatacttgagttaagtccgcaaaaacttgttgttgaaatttcagaaagtggagttgaagatggtatttcttactcttattacgaaaaaagtacctacaaaaaaattactgaataattatttaatcatcttttagtatgcaagaaggcagcatttgaagtaatattcacttgctgcctttatgaattagacacctcgtttttagatcgagaatatactattccgaccacaggaaagcccataaatatagggataaatgcggtccttatggattattgggaatcctttaattttgcacctatactctttaattcatccaatacctgttcattcatattttgcattgggaagtactgtacgcctgtcattgtgacacttactgatcctatgatacctgatgcctctaacatattgatgatcgtttggtcgggagtattgtctttttctaaagaaactaccatagcaataagtctacgagcattgactggccgtatacttcttttattaatggttatatactgcatgacttcttttatatcagacagttctttttttaacggttttaggccttcttcgattccttcctttattatccttagtgtctgattactattcattgggacattattctcttgagaactctcctgtggtaatttgtcttttaccctgcctgcctctgtcttgaggattaacgacgcgacatcttccgagcggactttgacatatctcttgaatgcttcttcggtagtatgtccagtgattttcatcaacagatgactatcataaccacgtttgagcatattgcttatgtaagaccgccgtgcggtatgagtacctattagttcccaacgttgtttgattgaattagtaacttttcctcctctgtcttctgttacaatgtgttcttctgtaagaccagcttttaaacctattttctttaaatatctcaacatcgtattttcagtgatttcaggtaaattgaaatcatattttttcagtatttccaaagctatagggaataatggaatagtaactctacgggtctttttaagctgcacaatttcgagtacttttccgctgctggtttcttttacgataccttcatttaatgattttatgtcactaaatcgttgtcccgtccaacattgtagaataaaaacatctctggcaaccccctctttataagggagtttaagagaatatatcttactgatttcttcctcatttaaataaatttcattttcatctccttgtctgcttttgggtttggagtatttgtctaatttagcttcgtgtatgtctatcaagttataaggttctgctcttttaataatgccaattagttgaacacacttattgcctacagtacttgttgcagttgttcgttcaccttttacttttttattgaataggtatgtttcatactctttaattaatgccagatttatatcgtcaaaactgatagtatcttgacctttttcttttaaaaaggtttggaaatcttttaatacaattaaatacgtttccattgtcgatcctctcttatgttcacctgaggttttgatagtcttgtcattggcaataatatcccgtagccaatgtatagcgtttattttattagttctttgcatattattatttttgtatatgtatttccttaataaattccagcaattttttagttcgcttggattatcacaaagataacgcttaaattcttcaatttgacttcttaactctaataattttttattggcaatagtattatttatattgtctgattctgtcagacgacaacttatatacgcttcttgtttcttgatattccaatgttcaggatatacttttactccagtcgacaatttagcttgcttctgatttatgcgtactatcaaataaatattagttggtctctcacttttgggttgacggaggttaaaattagcttttacaatttcattaataaagacttgatgtgtcataaccttgttctttgaatcggttctttaatttggttcttaaaatccgttcttttggactaaatatgatactttgtatagattctaagtgctctaataccccttctgagaatatctacgcaaatattaggtagtttccgacaaatcatgtaaatttgcgacaatttaataagctgatttttatgtcgtgtatactgaatattgaaacctctaccactgtttgctcggtagcggcaagtcaagacggacagacgatttttgtgaaagaagacttgaagggcccttcacacgccgtgtctttgggagtatttgttgatgaagcgttgtcgttcattgatagtcatgccatacctttagatgcagttgcagtgagttgcggtccgggatcatacacaggattgcggattggagtttcgatggcaaaaggcatttgttacggacggaatgtacccttgatcggtcttcctacgctcgaagtgctgagtgtgcccgtgttgctgtatcacgatttgccggaagatgcgttgctctgcccgatgctcgatgcccgccgtatggaagtgtacgctgccgtttacgaccgtgccttgaacgtgaagcgtgctatcgccgccgatattgtcgatgagaattcctatctggagtttctgaacgaagcgcccgtttatttctacggaaatggagccgccaaatgtcgtgagaagattacgcatccgaatgcgcattttatcgatgacatccatccgttggcgaagatgatgtatccgctggcagaaaaagcagttgccagagaagactataaagatgtggcctacttcgaacctttctatctgaaagaatttgtagcctcgttgccgaagaagtcgcttcttgaataacgcacttcagtagaaaaaagtgcctcagtaagtgaaccgcctttggcgggaaacagtgattagtgagtgaccgtcgtcctccgacttttaatttttaatttcaaaacttttaatttaaaagatgcaatacaatacccagcagaaaagaatgccgcttcccgagtacggccgcagcatacagaacatggtagattatgcgttgaccattcaggaccgtgccgagcgtcagcgttgtgctaacacaattatcaacattatgggaaatatgttcccccatttgcgtgatgtgcccgatttcaagcataaactttgggatcacctggccatcatgtccggttttgagctggatattgactatccctacgaaatcatccgcgaagacaacctggtgaccaagccggaaccgatcccatattctactacccgcatgcgctaccgccactacggacacacgctggaagtgctgatcaagaaagcctgcgaacttcccgaaggaaacgacaagagaaatctgacagccatgatctgcaaccacatgaagaaagactacatggcatggaacaaagataccgtagacgatcgcaaaattgcggaagacctctacgaactttccggcggcaaactacaactgacagacgacatcatccgactgatggcagaacgcctgaaccagaactaccgcccaaaggtgaactacaataataatcggaataataatccgcggagaagatattaaaaggtaataagtaataggtaataagtaatagcatagctgcgttcggcgtgttgcatgtattgagaatcttacttattattacttattacctattacttattacttgttatttattacctattacttaaaataaatggcttcatttgtaattgaaggaggacatcggcttagcggggaaattcatccgcaaggggccaaaaacgaagttttgcagattatctgtgccacgttgctgactgctgaggaagtgacggtgaacaatatacctgacattctggatgtcaacaatctgattcagcttatgcgggagatgggagtaacggttgcaaaggaaggcattgatacttacagttttaaggcggagaacgtcgatttggcttatttggagagtgataagttcttgaagaagtgttcgagccttcgggggtcggtgatgctgatcggtccgatggtggcacgtttcgggaaggcgttgatctcgaagccgggcggagacaagattggtcgccgtcgtctggacacccactttgtggggattcagaatttgggagctgacttccgttatgacgagtcgcggggtatctatgagataacggccgacaggcttcagggcagctatatgctgcttgatgaagcgtccgtgaccggtacagccaacattctgatggctgccgtactggcaaaaggcactaccaccatttacaatgccgcctgcgaaccctacttgcagcagctctgccgtatgctcaaccggatgggagcaaagatcagcggcatcgcttccaatctgctcaccatcgagggcgtggaagaactgcacggcacacagcacaccgtattgcccgacatgatcgaagtcgggagtttcatcggcatggctgccatgaccaaaagcgaaattaccattaaaaacgtttcctacgagaacctcggcatcatccccgaaagtttccgccggctgggcatcaaactggaacagaggggagacgatatctacgtccccgcacaggaaacatacgaaatagaatcatttatcgacggctccatcatgaccattgccgacgccccctggccgggactgacacccgacttgctgagcgtgatgctcgtagtggccacccaagccaaaggaagcgtactgatccaccagaagatgttcgaaagccgcctgttctttgtagacaagctcatcgacatgggtgctcagatcatcctttgcgaccctcaccgtgccgtagtaatcggacacaaccacggcttcaagctgcgcggcgcccgactgacttcgcccgatatccgtgcaggtatcgcccttctcatcgccgccatgagcgccgaaggaaccagcacgatcagcaatatcgaacagatagaccgtggctaccagaacattgaaggacgacttaacgccatcggcgccagaatcactcgaatatgataaagaaagaagaagtatataaaatcggactattcaacaagccgcacggcattcacggcgagttgcagtttaccttcacggacgacatcttcgaccgtgtggactgcgattatctgatctgtctgctcgacggtattttcgtaccgtttttcatcgaggaataccgtttccgttcggactccaccgcactggtgaagctcgaaggcatagatacggcggaacgcgcgcgtatgttcaccaatgtcgaagtctacttcccggtgaagcacgcggaagaggcggaagacggcgaactgtcgtggaacttcttcgtcggtttccgcatggaagacgttcgtcacggcgagctgggcgaagtggtcgaagtggataccgctacggtgaacaccctttttgtggtcgaacaggaggacggagaagaactcctcgtccctgcacaggaagaatttatagtggaaatcaatcaggaaaagaagctcatcacagtcgagcttcctgaaggattgttgaatttggaagatttggaggaagattaataattaataaagatgccaagaaaacggagtaaagcattttggaacaatttcaagttcaagtataaactcaccattatcaatgagaatacgcttgaagaaatcgtggggcttcgggtatccaagctgaacgggctttcggtgctgttgtccgtgctggcggtgctttttctgattgccgcctgcatcattgccttcacccctttgcgcaattacctccccggatatatgaacagtgaagtccgcagtcagatcgtggacaacgcgcttcgtgtggattccttgcaggaactgctcaacaggcagaacctctacatcatgaacatacaggatattttcagcggaaaagtgcccatagacagcgtgcagacgctcgactcgctgaccgccgcccgcgaagacaccctgatggaacgtaccagacgtgaagaggaatttcgccgccaatacgaagaaaatgaaaaatataatctgactacgatcgtttcgcagccggatgtcaacggactgatcctgtatcgtccgacccgtggaatggtttccgaccatttcaacaccgataagaaacactttggaacggatattgccgccaaccccaacgaaagtgtgctggcaactatggacggcaccgtctttctgagcacctacaccgctgaaaccggttacgtgataggcgtacagcacagtcaggatttcgtctcgatctacaagcactgcggctcgctgctgaaaaaagaaggcgaccgcgtgaaaggaggcgaagccatcgcactggtgggaaacagcggaacgctcagcacagggccgcatctccacttcgaactgtggtacaagggacatcctgtcaatccggagaagtacatcgtgttttaaagccaatgacgagaagtgggatatacgattataagtgacaagtgacagaggaattagataataatggattcagaaaagaagaataagaagaaacaaatagctattttaggctctacggggtctatcgggacgcaggcgttgcaggtgatcgaagaacaccccgacctctacgaagcctatgccctgacggccaacaaccgggtagaactgctgattgcacaggcacgcaagttccagccggaagtggtggtgatagccaacgaagaaaagtacgcccaactgaaggaagcgctgagcgaccttccgattaaagtatatgccggaatcgacgcggtctgtcagatcgtggaggccggaccggtggatatggtgctgacggcaatggtgggctatgccggactgaagccgacgatcaacgccattcgtgccaagaaagccattgcgcttgccaataaggagacgcttgtggtggcgggagaactgatcaaccaactggcacagcaataccgcactcccattttgccggtggactctgaacactcggcagtcttccagtgtttagctggagaagtcgggaacccgattgagaaggtgatactgaccgcttccggcggtccgtttcggacctgcacgctggagcagttgaagtccgtcaccaagacacaggcattgaaacatcccaactgggagatgggagccaagatcaccattgactccgcatccatgatgaacaaaggctttgaggtcatcgaggcgaaatggttgttcggcgtgcagcccagccagatcgaggtggtggtgcatccgcagtcggtcattcattccatggtgcagtttgaggacggtgccgtcaaggcacagctaggcatgccggatatgcgtctgcccatccagtatgcgttctcgtatcccgaccgtatctgctcttctttcgacaggctcgacttcacccagtgcacgaacctgacgttcgagcaaccggatacgaaacgtttccgcaaccttgccctggcttatgaggcgatgtatcggggcggaaatatgccttgcatcgtcaatgccgccaacgaagtagtggtagccgctttcctccgggacggcatcagcttcctcggtatgagcgatgtgatcgaaaagacaatggaacgtgccgcgtttgtagccgctcctgcttacgacgactatgtggctaccgacgccgaagcgcggagaatagctgcggagctgattccgtgatagctgcggagctgatttcgtgaacaatgaaaaatataaataagtaatataaattagaaagcgcctcggttttcctcttatgagcagagggtttggatgaggctttaaattgtaaatagactatatggaaacatttttaattcgtgccctgcaactgataatgagcttatccttgctcgttattattcatgaaggcgggcatttcctttttgcccggttgttcaaggtgcgtgtagaaaaattctgcttgttctttgacccgtggtttaccttgttcaagttcaaacccaagagaagtgatacggagtatgcggtaggatggctgccgctgggcggttacgtcaagatagccggaatgatagacgagtcgatggacaccgaacagatgaagcagcctgagcaaccttgggagttccgttccaagccggcttggcagcgccttctgatcatggtgggcggtgtgctgttcaacttcctgttggcgctttttatttattcaatgattcttttcgcttggggcgaccagtatataaaggtccaagaagctcccctcggtatggacttcaacgaaacggcgaaagcggtcggttttcaggatggagacatccttttgtctgccgacaatgtgccttttgtgcgttatgacggcgatatgctgagtcagatagccgatgcccgtgaggtatcagtgcttcgtgacggcaagaaggcctccgtctacattcccgaagacatgatgcagcgcctgatggcagacagcgttcgttttgcttctttccgtttcccgtatgtgattgacagcgtggtggttaattctcccgctgcgcaggcaggcatcctgccgggcgacagtatcatcgcattggacggaaaatccatctccttctctgatttcaagcagacgatggcggaacgcaagaaaaacgccgaaacgcttctgaaagacagcatcgaccctcgtctgatcacgctgacgtatgtgcgtggcggtgtgaccgatacgacttccctgcgcgtggattccgcttatctgatgggcgtagttgccagtctgacaacggatcgtctgctgcctatggtgaaaaaggaatacacattctttgaatctttccccgcaggcgtctctctgggtgtgaagacattgaaaggatacgtcggcaacatgaaatatctcttctcgaaagaaggagccaaacagttgggcggcttcggtactatcggaagcattttccctgctacgtgggactggcatcagttctggtacatgaccgccttcctttccatcatccttgccttcatgaacattcttccgattcccgcattggacggcggacacgtgctcttcctcttctacgagatgatagcccgtcgtaaaccgagtgacaagtttatggagtacgctcagatgaccggtatggtgcttctgttcggcttgctgatctgggcaaacttcaatgacatattgaggttcttcttctaagcagggattggcaagacacacacacccgtcctcccctcgtgcagaccggaagttgtcagaacagcaatcccggcgacagcggactgctggcggataaaaggaggatgtcggcgatgaagcaatgtatgttgttgaaatacagtaaaatatagtgtactatttatcgtatatagaaacggcgctttaacactacgttaaagcgccgtttctatatacgataaatgccttagtctgccaacgatgatacgccctttctccttttggctctttggatgcccggagacgaatgttaaatcattaacattctttggggtagtccgaaaagctggttttagctcgatagtgcaaaggaatgaactaaacagtagtacacaatagtaacttaactctcctccttcccaaaggaggagaattgaagatagaaccgactatcatttagctcataacaatatgtgaaagaaacaaatcggaaacaaccggttttctggattgatcctagtttcttctcctatgattttcgctcccgatgacagatagttttattcgtcatgaccgattcgtttctcttttcagcgtagacggttgcgacaaccgcagactgctgacaatcgccgccacaacagcaaacccacttccgaccataaggcagaccgccgtactccggtcgtgcacgacaaaactgaaaagtaacgctaccagcgtagtaccgaacgtctgccccagcaaacgtgccattcccagcattccacttgcaccgcccgaacgtttcgttggggcggaagagataatcgtactgttattgggcgtctgaaacaacccgaaaccggctccgcaaagcatcagacgaagaattatactgatatcggacgattcggcagtaagccccgaaagtgaaaaaagtccgacggcaaacaacgccatcccgatactccccaatatccccggatgaatgcgttccaccagataacctgccaacggtgccgtcaccagtgtagccaacggccacggagtcagcaacaatcctgtcatgacctcgctgtgccccaacgtattctgaaggaaaaacgggagagacaccatggccgccatctgagcgataaacgaacagatagacgtcagaatcgaaagccggaaaatcggtatccgcaataagtccagcggcagcaacggagtcgtctgagtcagttgcctccgtacgtaaaacgttcctacgatggccaatatgatcaattgcagcacaaggaaatccatctcctcatgatgcgcgaatccgtccagcgtataaatcagtaacccgaacgtgaccgcattggctatcgcactcacgaagtcaaacttccgcttcgaccgctcttcctgtcttggcaaatgcttgatacccagtagcagtgccgtaatccctagcggtacattgatagcaaacagccagtgccagctggctatcgaaagtatgccgcttgccaccgacggaccggcagccgccgatatcgccactaccatcgcattgattcccattccccgcccgatctggcttttcgggtatacgtagcgcagctgcgccgtattcacacttgtgatggccgacgcactgaatccctgaaagatacgtgcaatcgtcagcgtccagaatgaatcggacaaggcgcagatcagcgaagtgatgcaaaacagcccaatgcccgacaggaacactttccgataaccgataatctcccccaaagaagagaaagacagcagcgaaacaacgatagccaactgataaccatttataatccacgtagttacagcaggcgaagttccgaaatcgtgcgaaagcgtagggagtacgatgttgataatattcacgtcgagcaccgacatacaaagtgcgaatccgatggaaaccactgcccagatacgtctcggcattggcagtccatcggtttcatctatagaagtggtattattggcttgtatcataaaaaaaacttattctagtagaaccttattttgtttgtaaatgtaaacaaaacaaagaagtacgtgtttcaatcttctttgaaatataagtttttttagcgcaggagacacgcccacaacagttcgtagtagctccccccgcactaaactaatacaaaacctcccccaccattattacctataacctattacttattacctattctcaatatcctctgattgctgcttccccgaaattccagataaggtgaaaagagcgcctgttcgaaacgcccgtccaccagcacatctatgtagtcgagtacagccttcaagcgcggattagcctgaatctcttcgtacgtatatcccgtatagcaccagatattcagccccgtttccttctttacccttttgacaaaaagcaggaaagcctccggattataaaacggatctcctcccgaaaaagtaaccccgtccagcaatggattggctttaatttcccgaatgatcgattgaatcctttcctccgtcagcagttctcccgcccgcggattccagctctccggattgtgacagccgacgcaatgatgagaacatcccgcaagataaatcgaataccggatgccttcaccgtcaacaatcgtttcgggataagtcgataataagtggagagctgaaagtggagaattgagagtgttcatcttaaaataaaaattaaagtttcgcatgtgctgtatcccgcatggattcccctccttccagaaggaggagaatccatgcggaaacaatttacgaaacttcagtaaaaaataaatgagtgtctttcaacttctacaagtgcttcacgcgatccttttcttccgcccgtttggcagagttccaggagctgaggtcacctgtcaggtatccggtgatacggcgcatgcgtaagatgttttcgctctggcataccggacatttatcgaagattactcctttgtatccacagttgtgacaggtatccaccgggtgattgatggagccgtagccgatgccctcgtcgtgcatgaccttcacgattttcgcgatggcacgtacattcttctgagcttccccgtccagttccacatacgtgatgtgtccaccgcgggtgatggcgtggaaaggagcttcgcgcctgatcttctcggtgatgctgatcggttccttcacatccacatggaaggaattgacgtagtagtcgcggtccgtcacgccgtcgatcttaccgtatttccgtcggtctatcttggtgaaacgtcccgaaagtccttcggcaggtgtggcaagtacggaataattcaggttatatttctctttatattcgtctaccactttgttcatttccattacagcttcgtacagcgtgtcccatgccttctggctgtgtccgtggccttctccgtaaagtgccaccattgcattgtgtccgccgataaagccgatgcccagcgtaccgctgcgtaacgcatcgcccacttgctcgttcggattcagtgcgccgccgcctttccatacgtcatttcccatcatgaaggggaactggcgtgccagtgcggtgcgttgatactggtagcgctcgtacagttgatcggctacaagagtcgccatattgcggactgactccatgaaaatctctttcgctttctgttcgatggcatccttgttgcgttcaccctcaatcagattttccgccttgatgcgtgcttcgatggcgaggcgtggcatgttcaacgtggtgaatgaaaggtttccgcgtcccagagatgacttttctcctgccacattctcaaatacacgggtgcggcatcccattgtagccaactcgtagatataccgtttcggatcgtccgctttccatttctcgttcttgttgaaaggcgtgtccaggaacatgaagttcgggaaaagcgctttcgatgtagtctgacaagctcttagcagcagatcgaagttcggagcttcgtaagttccccgcatggcgtcttcgatgttttccgcacccatcgctttctcgaagtccttttcggagtaagaaactccgtcctttactttgaatatctggatcgggaatacggggacttcgccacgtgttccgagtccttcgatggtggctttcagcagttcctcgatcacgaggcggccttcggcggaagtatccgttccgtagttgatggagctgaataccacttggttacctccacgggagtgcatggtgttcagattgtggataaatccttccattgcctgatgcgtatccttctttgtctgctggtacgctttctctgcgatgcgtgtcaggtgttccttgtcaataatgatttgcagggctatcagggcgatgcgcaatgtctcgcgttctgcttcggtcgatttgatagaaggtagatgttccttgattaaggtacggattgctttctcgtccgcctgtgttccgttttccatcgccacgtagaagttgatgaacgaagccagatgtttgcggaaagactttgccaccccttttgccatgaagaagtcgaaggcggggattgcctgtccgccgtgctgctcgttctggttggtctggaagatgatggtggcaagcgtagcataactttggatgctttgcggtgtgcggatgctgccgttcttggtgcggaagccacgttcaaagagatcgtccatgtcatattggatgcaggtggtcgtctttgtcgggtagtaatcgaggtcgtgaatatggatatcgcccaactggtgcgcttcggcaaaacgtttcggcaacagatatttataggtatagtctttggtgacttccgatgcgaatgtcatcatttgtccggcaggcgtgtggctgctcatattggcgttgctcaggttcacgtcgttcttgtcgatggcgacgatgccgtccatcacgtgcttcatctgggttttcttgtcccgctccgtgttccgccattcgcggtagatgatgtacttcttggctacttcggggcgtaccttcatcaatgccttttctactaagtcctgaatttcctccacggtgatcgtggggttagtgaactgactgattacactcatcgtgacgtcagcaatcagttgctgctcgtcctgaatccctgtcgcactgaatgctttaccgatcgcattcttgatcttactgatagagaaatcttctcttttaccatctcgtttgatgatacaaatttccgcgtagttcataactttaactcccgaaagtgattaataatatgtttatttgactccggcaggtcttctgacttatccctcccccgcagcgccttcccacatctggatgcagtgacatagtgtgcggattcacagagaattacagcagcgggtactgtcgccgatttgcacagcgttccctcattgactaaacctctttttagttccgaaaccggatacaaagataaaggatattgtgatagcttggataggatttaacattaaatttcgggaaacttttctttctgcctgatacagaaagttttccgttttggataacttttaagaaatgattcttgcaggaaatattagtttttcttctctgttatattgaaatagtcggactctcttttaagtgtcccatgccccataagtgtacttattaaaggactcacgcttttatcagacttaaaaaaagatagactaaatgaagattttaaaagatttgcatactggtagaaagaagttttccagagttgagcggatgcattttttgcaagagctggaagaagaactgaaagtttattatctctcctatacagagacagtagataggccttattccgaacaggaacaagagattattgtccggattatcaagatgctgattcgtcagcttcggggtacatccaagtttcagttgtttagcaggagaggtacaagacgtaagtccgaagatccggatgatgtggaagagcgggaagagcggcgaaaggaacagacagacgagatacgtttgaaacataccaacctttactcgtacaatcctctttccaagaagtataaagcgaggaaagaagaactgcttcggaacctgaaaagggagttctaatcttccggatgtttcattgagaacgtccgggaagtaacaaataagagtagaccggcaaatgcgtatgtattgtgagtcccttgcgtttgctgagcctgctcttatttgttttagaattagccaagaaaaaataccctgacatgtaaatgttttagtttcatgccagggtaataatctaatagttattgttcagtcggtgacttttatcaagagaccgttttaacaatatgcaatgtcagtaacggacggaatatccgatatgatgtgctccatacattctttactccttctactgctatcggattgtttttagacttttgaatgtatttcagcagaaccttccgttgctggcgattcaaaatgtctatgtttgtagcccatagcataagtccttcttccaacgttgtcacttcaaactgatatgaggcattgtaattacgaatataggtaatgaaagtaaaggttgctttctctgatagaggaaacactgtatcgctcatgtcggtttctatcatgtttacatcatataagtacattaacttgtaatatttcctatcgccacatccctcgtggtatttttttgctatattcgcattgtaaagagatattagatcatcaattaaaaagaaatcacgccagacgttttttacgcagtctaattttactgggccattgtcatgatagcattccagagattcacgaataagtaaagacttcatttttgaagatatatgagacgtgtcatgaactaattcacgaaataaatcattagtcggcatttctgattgatactgatgaacaaagcaatgcttatcgttggcattaactaagaaagtaaatgttttcataatttcatttatttcatggttgtttctgagacttgaatctaccctaatgtaggaatatattgttctatgctaggatgttttattagtcgttttttttactgtctctactatattaagaagcaaaagagtactaaatacaataaaacatgtacaccaaacattacttagaccatttaatttggtaggaggatctatatcaccatatttgatattcttcttaaatgacttcaactgtttatctgtaaaaaaatcgacattatttatccataagttcaaggcttcttctaatgtctttgctacatactgactaatgtatgtcccacctttatagtcagcaataaatgtaaatagtttcattttaattacctcctctacctctttgatggtcatggtctcctgcataatccatctgttttttatagtgatctctttgttttttcaatgtttctaattcttttttctctttcgcagttttatttgttttagattttaaattatcatatttctcttttgctgtactataatcatttgcagcttgttgtcttttatcaatattcgaatgcttttcattcttcccgctagactttgaatacccgcttccgttattactaccttcgctaactcttccttttttggagaatagcttcatgaatccacttgttcccatcaatgaaccgtgagtgatatcatacacgcctttcgcggtaacccccaaagaaattcctgcggtttccggactgagtgccattcctcctgcagcttcttcgaaaccattaacaatctctgcggctcctgcaaaaatacttatgatatcaccaacatcctgtcctgcgttgtaggcagatgcgttgctgtatattccggtttcacggagtgacgtttgtccaagcagtatgttatctgccatagcccgtgcagctccattggtaaaacttagagtacccttaaagacgttgcttaatcctctgcttattcctccccatgtgggccacattccattgggatctactaataggataggattgttcaaacagtaagtgtatggactaatcttatagtacttttccgtcatcaggtccatcgtatgccatcttcccaataccgggtcatactgccttgctccgtagtcgtacaagttcaatccgttctttgtatccagttcctttccgttatacttaaaaggttgaacagatgaatttgaagcgaatattcctccgaacggataatagtggttcacttcttctatcattccatcttggctggcaaccactctgttgtttccttgatggtcttggatgtagtagtggaactttttatctgctatagagaaatatccctgttcggtcaatagcttgtcccggcttccattttcatagatcacattgccgcagtagtcggttgtagtggtgtttcctgcgattatatgtgtagtttggagtttagttccgtctgcgctatataggtaagaaatttcactaccgtctttaaactgtatccgacgtggtaaatttaagaaattgtattggatatcagaaatgtttttattcaaatcttttgttaaattaccgtcttcgtcgtaggaatattccgtgtccagattcacaccgtccttgaactcgaaaccattcgcgtatgctgaacttgtggcgctgtctgtcactttcttgagctgattgcctgtgtaagtaagagataggtcgtcaattaatccgtaactgctttgtccggtttgcccataacgcttcagtcctgtgatgttgccatgtttgtcataaccggtcacttgttcattgaagtgatttgtattcgtcatcgaattgcttccttcactataattggcactggtcagcctgttgagcttatcgtatgaatattggtaattacgggtgattgactctttgtttgctttccacgtcatgctactgatatttccgccatactggggagtgccgggaccatcagtataatgtagcgtttgagagaagagagggctttcgatagacgttagccagttacggatattatacgtattggtcgttgtcagtgtggaagtgccgtctattcgggttaagcttttaatattgcctaagtcatcgtagagatagctcattttcgtagagtccttttcatttacgatttgtacagtttcagacaaacgtcctgcgtgattgtagctgtgtttggtttcttcgatcagctcggagttacttttggagtggatatgcttggtgtgcacaggctgtcccgtaaagttgtaagcagtgtatgtcttttcgtatcctcccagatgattggtcgattttatctgaatggcacggccgttataatcatagtaagtaacggtatagtcgtatcctgtcacagatccgtttttgtccagtcgagctgtcgcgtttccggtctgcaagccttgcgaactagtcgtatatctttctccgaactcgctgtttgcttcataattcaaactgctgttggaaatcagggtgccgttctgcatcttaaacagatagtcgtcataatatttggcggtaagcactgtgactgaattcagtgcgactccggttacggaataaccgagaagagaagcgttgtccgtacgttcacatttgacgcatgtattcagtatcgggttgttgaatgggtctatggcgtttttacaaatccccgtgatacattcgcgccccattgcgtcgggcaatgcgaattgccattcacctctttttcgttgttctcctgtttgggagaagataaggcggtctgccaagtcatagactttgtactcccaactgcagcccggtaacttggtgcctatgcaccggttacgcatatcatatttatagagataggcgtattgagctaaggatgcggaagtttgactcgaataactgctaccgcttacgagttgggcggataccataggtggaagcaccgcttttaaattatcgaactcatcataaagataataagtgtcgttattcgtcttactgccgttgttgtgctcaatttgccggctaagtactacttggtcgaatttattcttgaattccaatgtcacttgacgatcttcgttttcggttcgggtgacggatagctcggaagatttgcaattgccggctactttcagctccatgttttggttatctttttctgtcatttcaaaccgaagacagttgagcgtatcatttccggctatgttactcagatagctgaatttggtacttgctttttgcgaacgccagtcgcttccgggaccatacacttcccgtactcttcccaaaggtgaatcttcgtagactttttctgaaaagtgataagtatattccttatagttaaaagcatagaaatcttgcagactttcggtaaacttccagtctatcatttctgtgttcgaaccttgtgcgtatggcaaatacgatttggcatcatctcttaacaagttatcataaacgatcggatggtatatactcttgttcttattggaagtacccacttctattttctgcgatggatatcccagaccgttgtagtaagtaatttcttttcttcccccacttcttgtgttatccagataattcgttgtggaaatatagttgtctcttccaataggtaatatttctattggaatgttttgaggtgactgtttgataatgaagtgtactggaaatgttgtttcgaatgttacatcaaaaaagagtacgacgaactcggatgatatgtctgaaattcctacccctgtgagccttaaacatcttcttaaatcttccgttattcttgaaggcacgagcctttcgatttctgcagtgaataagtgatttttgttttccatcgttactatccactgacctccgtattcgagatgtgaatctatagaagtcgttactctcaatcccagatcggataaagatatctctccatgtctactttcagctggcattatttctatcggaaaatcctgaggggattctttgataacgaaccgtatcgtatctgtcggatcggccgttatgtgaaagtaaaggttgcatataccgtctgaattagaagtaaactcaactttgaaaagtctcacgtacggacgcaattcttctgatatgcgtgaaggaacgaagtttttgatttctgcttcgttcaagctaaagttgttccttgctgttatcatccaagtatctccttcgtagagagtactttcaggagaaggtgtgacttttagccccatgtcggtcatggatatttgcccggtttctgtcgccaatacaggactggcgagtaagctgcatattaaagctgtaatataaataataattttcataaatttatctctttagaggttgtttgaatatttatatgaactaatcagttcgcccttatggtcggtcttttctatcagacgtccagaatcatcgtatttaaaataggtagaaacattcttgggatctctaattttgctgatacctatgtatgggatatattcataagtagtgataaatgatgccggtaattgcgttctcaaattttcaactttctgcatgtctgaatagctgggcttcgttgcgtctgccagtcttttgataagatcattccccaatagtcctgtaactgattcgtaatcgctgttcttgatttccgcaattgcatatttgcctttgtatccgtacaggtagacagtttctgttttgtctttttcgttacggatatgagtcgggttgctgtaagagtcgtatgccaggtatgtggttgcgggaatattagaaacatcggctactaactcgttgcccacattatggagtccttggtatgttgcagcatcagcatgttttcccagtatggatactttgtctttcactaagcttttgctgtctgcagtcagtaacttatagaaatatgtctcattctcagttacttttccgttttttatctttgtcacttccaatggatagtcggtgaagtgtagctgattcatctggtagaaagaactatagggaggtacaaatggaaatatcagcatgtccggcacgtatcgcgtcttttcttcgtatacatttccggctccgtcttcactggttttcagctttatctgtttgttgacggagttatattcgtatttatctttatactcaatagtgtttccattgtcatcgtaagtgatagtccgtttttccgaaagtaggttgctgtagaatttttgatagtaggtacctccgaaagcaaacctcaggaatcccagtgtagggtcgtctgaattatagtccatgacattagtagtggttatctccgtgatgagtatggaatctttctgtataggagtatattcgaatagttctttttgtttcacatgaccggcatagtcgaattgctctttgctcaagagcattccccgctttagtgcgtttgatgaacatggagtgtatggactataaggggtaccgacatgaggagggtattcacgggagaacttattattcaacatagctatgggatcttcgtccatataacctggtccgaaattgctgaatgtatggacagtatatccgtctatcagtttcccatttttgtcttcattgcactctatgactttagaatatccgatatactctccccgactgttgtaccagagcggattggatgcttgagacatgatggcattcaaggtataatattcgggtcctccgttttgtgatttgaggagattgtatagctgccaaccccaaaggtattgtggagtgaaagatagaataccggaagagacacctccctttgttgtcggtgtgaattcttttgtgtagtaatagtgctttcttgtcagtagttcatcattgctatcgtagttgttgatttctttgatacggagacctcccggatatgtataatctggagtgcctggataaggtaaatgggcactttgtactgttttccggtctgctgacaccatactggatatgacgttgggttcataaatgaattctgttcttccatgtgtggggtatgtgatggattttagcgtttctgcagtcacacgaaatcctcccttgtctcccattcttttgttggtatactctttgccttcggctatctgcttgtcagcaaaaattgcattttcaaagaactctttgctgaaatagtatgagaaattttcaccgttattgaatccgaggttgtcatagtgtcctgtattatatccgggtaggtgattggggaaataatttagtgaataggtcgattgggttcctgatggagtcgttttagtcagtgttttcagttttaatcgctcagtggagctattagtgtaagtaaactgatagtttatcttatccaatattaccacggagtttagcttgtttaacgtgaaattcttttcttttgtaaaaaatgtagctggcccatggtccatacaggtttcccatgcatactgtgagtcatagggtaattgtgtacttggggagtaatgaaaccgggcaagtattttattgtctgttacatctttgactgttgcaagttgtacaggggctagtaattcataatcataactcattgctgtttgccagaatagagcatccaagcttatacagaaagacatatttccatttatttgaaacggcataatttcgtaggtgaattctatttcatgtcctgcaggagttatgattttggagagatgccaggtgatgggagcaggaaggtttaagaatcccttgaaaggtagattgtaatctgttttatcggttcctccaaatatgtatttataaccgtctggcgtggtcagtgtaaacgaatcaatcaaccaacatgataaagggttcttaaatccggttccttctgatctgcaatagttgtaaaattgagaaagtggactggtaagttgagaacgggtattattgtaagtattcgaggtaaattcaattttgatgtcagaatctgattgaaccatccacttgctcttttcttgactatacataaagcttccggtgtaaccgagaaagttaaattgatactcgtcttgggtattaatatagttgccggatactcttactagaatgtctgctgtggttaataaatcagcttcggtggttataggcttgtattcattgctagaactttcataagaaatatctggctcatttttaattatccgggtaatacatcctccgcattcaaggctccatcccaatcccacttcactgggtaggttgttgggttttacattataaatatgataattgaggttgattggaagttggatattatctcttaacttaaattcgtacaatgggatagagatattcggagttccggtatatagtccgacaggtattttaccttgagtgttggcattactgacacccggttgtggaaagccttgtgcccctgtcaacccaattactttctcaaattgcccttgcgctttcaggcaattacttgccaatagaaaagctatggtgaataatatatatttcattttcattattagtttattgatttttgtatactaagtccgccacaaatatttctgtatactgctgtggcagctgaaacagatatcttggtggcggacctcatttttgactttcttacagactcatcgcattagcgcccaacacgcctgctactgccgaagccaccgcgatgactactttcagaatcatatcccaaagggatttcttcattgccataatttacacacctcctttccgatactttaaaagattaattacttcctgaaaacgtctttatacctttgctcatttatattgtcctcacaggctttcctttacctcaaagcaaggacacgccttgatccactcttccggttcgatctccccatctccgttcagatccggactgagatcccggtgtccgcacacccggcagccggggaaacgttgctccaattgatgcaccagcaggcggagggcggcacgttgttccggcgtccgtgtatctgccgggcgtccccggcagtccagaccgccttcatagcagattccgatactcgacgcattgaatccttttgcatgtgccccgatgcgttcgatgggacgggtgagaagtgttgtcccgtctttgcggatatagtagtgataacctgttccgttgaatccccgtcgccgatgcagcgtctccagatcaaaggccgtcagtgtccggtccacccgtgttgcggaacagtggatcacgattaaatcgatctttctcatgattcgtcagatttgataaatacccggtttatgattgccttatacggttgggtccggagcttcttcgtcaccgtcatcggggtccggtttgggtttggggttttccggatcggtcttgtctccttcgctgctttccggtttgtacttgctgtagtccagcgttttcagtgcgtctttaatctcctttccggggcggaagcggacacgggcacctttgatcaatccttctttcacgtccttttggacgagtacgccgttgctgcgcaaggtgacatagaacgaaccgatattccccaggcggacgatctctcctttcttgaaactgtcgatcatttccgtctgcagggcacgcagcacgcacactacgtctgcccagttcacggtactcgaacgctggatgcgttctgccatttcatctatatcgatctctccgctcgatttggcgagagcgtaatacaggtccggcttgtctttttccatcatgttcttgcggagcacgctggtgaatgaaaatacttttgccatttctttactggttttaagttcttgaataaatgataataaagtgttgcgtcacaggtggttccttgcttgtgacatgacaaaagtacggcggtggggatgggcgatgtctgtatttgtccgcaggtgtccgccgatgtctttttttatccgtaaatgtctgcggatgtctgttcttgtggtggtttgaggccgggattaaaaagaaattccctgatgcaagctgaataatactgttcagttcacatcagggaatggaacgattcgttcctgattggggtttaggactatgttatgctatgtcttattctttattgtctatgtcttgtaggtcccggctaagtttgttttccaactcttcgatactgggaagtccggatttgatatctttcggcagggcttgaccaagttcataatcggagattcctataggtttatgtacatcccgtaaggcgtattccgccataatctggtctttgttttgacagagtagcagtccgatggtcggattgtctccctcccggcaaaggatatcgtctacagccgagcaatagaaattgagtttgccgatatattcgggttgaaattctcctctcttaagttctacgaccagatatctatgcatgaaggcattgtacataagaatgtcaatgtagaaatctttttctgatacttcgatatggtattgcctgcccataaaggcgaagcctgcacccatttcgacgagaaacttctcgatatgttttataaggcccagttcaatatctcttttgtcgtactcttcggtgaacgtaagcatatcaaaaatataggggtcttttaatgtctcttttacttgcttggcttgtatttcgggaagagtggtgtcgaagttactagccaatgctccgtgagaatggtaatagtcttgcttgattgcctcgataaggaaatcccggctccaaccgtttttcaggcattggatcatgtaccagtagcgggcttttatgtctttagtgcgttgcattaaggttatattatgtgaccaacctaatttgctgacaggtaggactatttcattattgttcaaatacgaaacggcccgtttcgtatttgtaagttgctgattatattcattatagaactgtatcatgaactggcagttcctgacagagaatcctttcatctccggataatcattcttcaagtcattggcgagcttctccagggcattgtttccccaacctatttgtttttgactctcggacagtagtttgccaatatcccaatacattgaaagcatttcttcattggctgtgtaaatcgcctttttttgtgctagtagtactcttgcttttacttgtttgagtagatatgcatagttgaatgcatggttttgattttccattttgatttcgtttgttccgctaaagatactacttattattggttaatcgctccccctgttctaattattttctttgcttgtctgtatttgtccgcaggtgtccgccgatgtccttttttatccccaaaagtctgtgtttatctcaataaaatctgcttattattttacaaaatgaacttttattagtacctttataccattataaaatgctaataaaacgagattatgaaagaattaattgaagagaaaaattttgaaatgagagcctatgacaaagtagagctggctctgctttattgtccgggacgttcggcagagacagctcttaaaacactgatgagatggatcaagcaatgccagccgttaatgcaggcgttgggtggcatcggatataatgcacggcggcaccgtttcctgcggcaggaggtggaacagatagtccggcatttgggcgagccttgaaaaaagagagaatgaagtaccttcctctgctgctgttcatacgtctttttccagttttcagtatatcattcagccgattgttgtacttctctttctctcttcttgtacatgctttgcttctttcttgtacttgatagaggcagtttcagtacttctctttcctcattctagtacttacatctctttgttcttgtacatgctttgcttctctcttgtactggtttctgtcccgtttctgacgtccttctttattttgatgtacgttttctataccaatttatcgggcattttccgttactgccactgccaactgccacttagtgcttatttgtctgtgaattctttcatcctgatatatttatctgtctgtttctcaatgtactttagctcgatgagattctttagatatctacaggtacttcgttcgctgataccttctgtcagtgctttctctttaatctgtttgtaagtaaaagtcttagggaggctttctacgaccgaccggattcggaagtatgactgcataggttgaggtttcattttctctcccggtagtgaggaggcgaccaacaggctgtggttgaggatggtttgtacgatctgcatggaggcatggaaatcctcgtctgtacagatgtattccttcatgtgcatggcaccttcatacttgcgcagggcggtgaagatggaagctatacgtgccaccatcagtgcgccacggagtacgatagagcccggcgcgtccgcttgttcgctggccacttcgttgagcagacagtcgaagtaggcggtatgttcctcccattgtctgtcgctcagcgtgacttccgtaggagattgctggaagaagaagtacatctccaatacttccttgccgaatcccttgtagagtgtgatataatcctcctgtcctttgatgggggctgccgaacggtatttccatcgtgctccgcaggtgtagatgccgaaacggcagtaaagtccgttttccaaagagcggataaagttggccagttggctgggggtgccggacaggcagagtgccaggcgcggtacttctgcgcagatgagttcgccgtctaccttatagtccgtggctaccggttcatgatggtaggcggcacggaacacatcgtcgtgcttgccgtaatcctgcttgatggcgccggagatcatgtccaattcggtagcacagataatgagtccgaggtctccgttgattttcagccggcggataatttggtttctggaagtgctgggggcaccgcagaggtggtaatattccggtggttcgggcatgggagcaggggaggctgctgtagatttcgtcccttttttgatttgttggttggttcgttcccattccgtgagttcacggtcgtaggcatcctttttccgtttgttttctcctttcagataattctcgatttctcgtgggagcatgtttgccagtgtgagaagtcctttaccggtggcggggggagcaatgatcagggtgtagagctgcggactgtaaggacgctggtcgaaactgatgcggacttgtggcaggcatccgctcaggttggcgatcagtcctagaagcagtatatcgcgttcgcgtttgctgcgtgccggtttcatggctcttttcagaaagtcgggaagatggtcgtatacttggttaggaatgcagggagtagatcctcgtaattcttcattttttatggacaactcttcttctttccccgattcatttcccacagaaacaggcctaaaggtgtcagttgtcagtgttggcagtgaattgtgggtctcttggggtgcataagatagatcaacgtattgatatccagctgataagtcttttctgagttcttgcagcgtgtagccgtttctcacgatctctactgacataacagatgttaatttttcaaggtcttcttttgaaaatcccttacgtcgtgcgcttcttcccattgctagcatagactcgtggcggttgcctttctgccaggggtggtaatgggtgaagttacgggcgaaggtttcgatgtatccgcaggcttcggtagcgggagggaagggggaggaggagccgttactggtggcataaggggtgccgttgctgcccggaaggtttcttttatccttgatcaggttggtcaacgaagggtcggtgtcgagttcttccctccacggataaggttcgggagtgggattgtagtaggcatcggcatcccatacgcaagaacagggctgggtgatgcgggcgcattgttcgtcgcacggatgcccggcgatgcgttccagtgtctgctggcagatggcgtaggcgagaggatactcttccggggtgcgggcatcgagaaatacgacgactttgaggcctctgtcggagatactggtctgcgtgtaggccacgtaggggagagcacggaaaagggctttgacggcagatgtccgttcgttcaggtggtcgaggtcgtacatggctagtcggctcatcttttccagattggctgcggcatggctgcaatgcgggcggcagatgccctcgatgatgacgacaggcatggcgtcttttaccattttggcttcattgctgcggtcgggacggtcttgtagtttgcggtagcattcggtctgtgctttccaaagtgttccgatggtttgcagataaaggttgtgcagggtgattatggtagactccttgctccaagtatttctaaaaaaagaaaattgaaattgtaaattttcggtttgtggtaagctttgcttttccatactatgtttttttgtttttattgataaatgatagtatgagataaagaagggagaatagtgctttcactattttattgagtgcagaatagtcggttccttaagtcggctgcaaagatagaccgggtgtaaggaagggtgaaatgttaaaaaggtgattttcctatgtgctatgcttggtttttatctggttacaactacttcaatgtcgtaattgatgaaaagtccgctttcaataacgcccgtgattgttttcagctgttcttccagcgaagcgtcaatataatggaaacgggtatcaaggataaagtttccgttttctgtcaaaataggaccgtcttttccgtgggcggggcgtagtgatatttcggaggcacccagtcggcgcagttctttttcgacgtatgacagtgcatgcgggaacacctctaccggtatggggaatttgcttcccaagatattgacaagtttgctgggatcgacgataatgaaggtttttccgctgcttctgatcagcagcttttctttgaacatggctccgccacgtccttttatcaggttgcggtcggggtctacctcatccgctccgtcgaatgtccagtcggggcgtttgtcccaaagggtggtctgcgggatgcctagttgtatgcaagtcatggagatttcctgagaggcgggaatcacttccagatataggtgctcttcgtgaatccgctttgccagctcaaacaaagtgaggtagacggtggaaccggagccggcccctatcacatcgcctgttttggctgtggcggcgatctcacgtgctacacgttctttcgcttctctgttgataatctcattggaccattggaggtctttgatcaggtgattttcccagttcatggttcttgcagttttagagtctctatttatataacgaatgaaagggagtgtttggttcaacaaaaacggaagaattaaaaaatagatggatgattggttggaatatagtttttaatatctatatttgtaacctaaaggtttctttttggaacctatgggtgaaacttaaagataagaatatggattaaattctatggttatggaaaatattacgattgagaaaatggagattaaaaggtttaatgctcttttgatgcggacgattgtcggtatgttgtttatgggagtattaatgtgggagacattttgtcttgatactggtagaaagggatttttgggagagacatggtatatatttgcatttgcagttttgctgtatgtcgttgtagcgataagagcttccgatattttggagagaataaagaaagataagaaattaatgggagcattagatagtgaaatatattcggactataattctaaggctttgacagcaggcttttatgcggctatgcaaatgggattattagtttattgctttggagatttttttaatctctcggtacgtatgggtgctctggttatagtggtggtagctatgcttttctcagaaataagaagattgcttctgtataatccctataaagatggaaaataaagaactgctcaataaaataaaggtctacagggcgatgaagaatatcagccaggaagaactggctgtagccattggagtaacccgaaagacaatcaatacggtagagaccggaaagtttattccctctactgtccttgcgctgaggatagcacgttatttcggggttccggtggaagaaatttttgtgttgaatgatgaagcatcgtattgaaatgatgaactctgcctgacggctttcttttacttacaatatcagccagatcgctatgatatgccctatgcttcctcccaaacagaacagatggaacgtagcgtgcatatatggcttgcgcagcgaatagaacactgccccgatgatatacgaaactcctccgcctatcagccaccaaaaagccggaccggctcccatctctgctaaatgatccatcaaaggcttcatagccacgaggatgcaggctcccatagctatataacaagcggtttccagattactgtgttctttcagtttcttgaaactcagtataaaaccgacgatagccgacagccagacaaaagagaaaattccccatccccaaccgcctgcgtgcctcatgacgagcagtgtaaacggagtgtacgtccccgcaatgtgcagatagatagccccgtgatcgaatttgcgaagcaattccttcagcttacccggacggctgccgtgataccaggtggagctgacataagaagacagcatgccaaacaggtagacggttacacaagctaccgcccacttcggttcggcacccgccgccgctttcgcgagcaggaaatagccggctatgactccaagcagtatacctgctccgtgactgagcgtgtttgcccattcttcgacgttattgtatcttttattttccaatgtttcctttcggctttggttagagccgcaaaggtacacttttattttttcttgaaagccagagtgattttctttttaataggttgggttttctttctaaaccagttttccttcgatgaaggtggagctgattcgcgttcagctttgattgattttatcaaaaactctttcatctgattggctggtgggtatatccatacaaattcagagtctctataactttggtcagcttccgaaagaaaactccaatcttccgtgtcaaagttataaaacccaagattggtttctccgtgttcgtcacaagtcagtactatgactgaaaactcttcttcctcatgtctgggaagttctttctttttgtatatcttcatattctctttattataattttgttattaaattgttttgctacttgttttcggaaatcaaggaataacgcaagctggctgacgttttctttcagtgtcggattgcgtccgttggagtaataaggtatctggatgtcggcatacgccgttgcggtggtgtcgggagcaaagctggtcatggtgagctcttccttggagggttttccgtacttcagattcggtttgatcgtgttatcggactgctgtgaaaaggtagtcgatagcaagcataacagaaatgttgagaatatgaatagtcttttcatatcgagtgtgttttgtcttctccgacaaagataaaaaaaatagagaaaggtgtgtctcctttctctatttttatttcagttatgcggataaaagattataccaggtgtccgatccactcttcgcggtcgcccggaaggaggtcgatgacggggacttctaccatggtgtagcaccccggttgctgcttcatggaagcgcgtgccacgcacacaagtacctgtgcagtcagtgccggattgttgatgcgcatattgaactcgaacagctgattctgcgttttaccggaaactcccttgcgagtcagatttacaccgtgtcccatatcgagcagtgcgtctacgctgggcacaagttttacatgtgtctcgtcgttcacgaagtaagggtctgccttgatggctgcggctacttcttcaaacttgtatccgtctttcagttcgatatataccatgcggcggtggattcccgttccagtagggatcgtcatggagagggcggctttcactccgtcgatcgcttttacggctacggtgtgtcccatactcatgccgggaccgaagttggtgtaagtgatgcctttcggagcgattgcttcgagcatggtgcgtacgatcgagtcgcttcccggatcccatcctgcggagatgatggatacggctttgtgctctttggcggtggcatccagcgtgcggcgcaggtcaacgatgcctgtgtggatgtcgaagctgtccaccgtgttgattcccattgccaaatattctttcgcgtatttctcaacgctgcgggtcggtgtgcagaggatggccacttccactccttccagctctttgatatctttgactactgcatagtttgccaactcttccggcttgttctctgctcctgcacgacgaactactccggctatttcgaaatcaggcgctgcctgtagcgcttcaagtacatagtgtccgatattgccgtaaccgacaatggctgctcttacttttttcattcttttattggttttatatgaacatttttctttaattctgccacaaaagtaaacaaattactaggaagttttgtttactgcctgcattatttttaattttttcacctctgactgcgaggcggaaatgttgcgaaagtcttttcatctgtggtgaatttgtcttatctttgcaaggtatatgatagaatatgtaaaaggcgaacttgccgaacttagtccggcaaccgcagtaatcgactgtaacggggtaggctatgccgccaacatatccctgaatacttattcggctattcagggaaagaaaaactgtaagttatatatctatgaagctattcgggaggatgcgtatgtgctctacggatttgccgacaagcaggagcgggagattttcctgctgctcatttccgtgtcgggcatcggaggcaatacggcgcgtatgattctctccgccctttcgcctgccgaactggtgaatgtgatcagcaccgaaaatgcgaacttgctgaaaacggtgaaggggatcggactgaaaacagcgcagcgtgttattgtcgacctgaaagacaagataaagacgatgggagccaccgtggcaggaggaagcgcttctgccggaatgctgctgcaatctgccagcgtggaagtgcaggaggaagcggtagccgctctgactatgctcggctttgccgccgccccttcgcagaaagtggtgctggctatcctgaaggaagaaccggatgctccggtggagaaagtaataaaactggctttgaaaagactgtagaataggtaataagtaataggtaatagggcgtggagaaactaaaacaagcaacagaataataatgaaacaagggaaaatttatatgaaagcatggctggatcttcatggccgtgcaaaggtgttggcgacggatcactggtatcttgaatttgccaatcttttattgcctgtcatcagcgaatcttatttatataagtcggagacgcaggaaagccagaatcaggtgactctgatgctgactctttatctggaagactgtgtgacggacggaggtaactggcgccagtttatccgttggcataaaaggaattacggacgttacctgccgttttatgaattgtcggaaggttatctcaccgacgagatcaataaagaggatatcgctttcttgctgtggggaattaactcgccggtaggcgatgactttgacggtgtggagaatcccttggatgcggacttgctggagtttgccgatgtgatttatgcgcagttggaggatgttttcgagaaagcgcctatcagtgacggacttgccggagactggctgatggaatcggagttgatggagaagcagcggactgctttgcctgttgcctcgccgggcgatcagttgcccgtgaatgtggagcgcttcctgaaagcgagtggtggcgagccgttgatgttcttcgattcgtatgaggctttgaaactgttctttgtgcaggccctgcaatgggaggacgaagaagatgctctgttgcccgacttgaaggagttttcggatttcgtgatgtacgctaatccgaaaggtttgctgataggtccggatgtagcccgctactttgccgacaaacggaatccgttgtataatgcggaaatggctgaggaagaggcgtacgaacttttctgcgaggaagggctgtgcccgttcgatctgctgaagtacggcatggaacatgacctgctgccggaagcgcaattccctttcgagaacggaaaagagctgctgcacgaaaactgggactttattgcccgctggtttttgggcgagtattacgaaggagaatgatactttgttaagttatgccaatcaaaaaaaataacaatccgttcgccggaaaggcgaagcctgctgccagaaaaaagaaagggacggggaaacggataggtaagtcaaaggtggagaaggctaataatcagttgaataggagagtgaaataagcctttggagactgcgccctttctacctgtcaggctacgccgttttatgtaggcaggctacgccgttttaggatgctggtttacgccgtttctccaaggtaaaagggtgcgagcaagaaaacaatgctgcgtctctttaaagttggaatgaaatatcattactatttgtgcctaatgataagtcggagaacagtctcttgaattgaaataaaaatcagtaagcgatgaaaaaataaatgtgctatctctgataaacacaaattttcatcgcttaccgttttttacttatccttttcggactgcttgatttattcttctccgatagcgcttttatcacttttccggaaagccgttactccgaaagaacctttattcttcggcagcttcttccatcgctttccgttcttttttcttattgataaatccgattttcagattggcgtcttcctgttctttcttgatttgctgcatggcggaaaggattttcgacagttcgtaaacgcctgctactgcctgtcggtcggtcggactcatcgtcgttgtgtatctacggtcgccgataaattccacacggatattcttgtccttgttgaggttcagaaattcgatcacgttaccgtcttctcccagtttgtaatcggctttttctattttctcgttcatatccgatgtttcgtagctgtccttcgaagtcggagtttcggcaaaactgccgtcgggagtcatcactttgacgcctacatgatggatattgccggctccgcaataaatggaagtcatgctcataattccctgctcgctcacttggaagcgaaggaaggaacgatggagattcttctcgatggcttgtgtaggccatatgtagttacccacttgctgatattcggcatctttctccagggtgtacttgcctttgatggcgtcaaacgctgcttgctttgcctggagagcactgtccagaaaggccagaatctcttgttgagccttgagttccacatccagcatcaattcctgaccggctttgcgggcctcgaatgctttgggatacaaaatcttgatactgtcgatttgtgtctttgcttcttcgtagtcgccacgttcgtaggcagcacgggcaatcgtcagtttttcattggcttttttctcgatgccgtttccgcaggctgtcagtgccagcgtgccgcaaaagaagataatcagttttttcatcataccatttacattttactattagacgatttgcgatggagatgggacgtgcagtgttcacgacttaccgccaactgttcgttacttgcggtttgccgttcgtgttacttgccgtttaccgttcctcgcccgttcatcgtttactttatagcgacaaaaatacaaatatatcccttatttttgtaattttgccccctcaaaacttgtattggcaataagtgtttgatgattatggaccgcccgaccggtgttttcatcgactatttaactgtctgttgccagtcgttaagcattaaaaagatgatagagttgactcaagaggaactgaaacagtattttagcgaaccgatcttcggacacattgccgaaaccgctgacgcactcggactggagtgttacgtggtaggcggttacgttcgtgatatttttctgcaacgtccctccaaagatatagatgtagtagtagtaggcagcgggatcgcaatggcggaagcacttggaaaacgcttggggcgtggtgcgcacgtctctgttttcaagaatttcggtacggcacaagtgaaatataaaggtacggaagtcgaatttgtaggtgcccgcaaagaatcctatcaacgggattcacggaagcccatcgtggaagacggaacactggaggacgatcaaaaccgccgtgactttactattaacgcgatggctgtctgcctgaacaaagcacgctttggcgaactggttgacccgtttggcggcatggcggacatgaaggaaaagaccatccgcacacccctcgatccggatatcacgttcagtgacgacccgctgcgcatgatgcgttgcattcgctttgccacgcaactgaatttttatatcgatgacgatacgttcgaatcgctctgccgtaacaaagaccggattgaaatcatatcccgtgaacggattgcggatgagctgaacaagatcattctttcgcctatcccttcaaaaggctttgtagaactggaacgaagcggactgcttccgttaatttttccggaactggctgccttgcagggagtagaaacacgaaacggacggtcgcacaaggataacttttaccatacgctggaagtgctggacaatatcagcaaaaagacggataatctttggttgcgttgggcagctttgctgcacgatatcgccaagcctgcaacgaaacgttgggagcctaaagcgggctggacgttccataatcataattttatcggtgagaagatgattccgaatattttccggaagatgaagttgccgatgaatgaaaagatgaagtatgtgcagaaaatggtcagcttgcacatgcgtcccattgtgatagcggatgatgtagtgacagattctgccgtacgccgtctgctttttgaggcgggggatgatatcgacgacttgatgacactttgcgaagcggacatcacttcgaaaaacatggagcgcaagcagcgttttctgaataacttccagctggttcgccaaaagttgaaagaccttgaagaaaaggaccgtgtccgtaatttccagcctccggtgagtggagaagagatcatggaaactttcggcttacagccctgtcgtgaagtcggtgctttgaaaagtgcgataaaggatgctattctggatggagttatccccaatgagtatgaggcagcccatgcttttatgctggaacgggcggcgaagatgggactgaagcctgtaaaatagcttttcttgttcaaattggggtgactaacaagtggattctatctctattctcctccttcgggaaggaggagtggtcgcagaccgaggtggtaggagaaataatgtttgttcctatttctttgtaaatgatagggttatgtattcacctaccacctccccctacgggtactcctccttcccgaaggaggagattcgagatactattgactttttagtcagccccaatagaggtagaaccgactttttagtcagtcccttatgacaattctataatttcttcgttacagttagtcagtttctcaactccttcgtttgtcactacccaagagttttcgatacctacagggcctacaccgggaagaacgattttcggttcgagagcaaagaccatgcccggttccagttcctgtttgatgcgcggagcaagtacaggcgcttcgttgatttcaagtccgatgccgtgaccgatgaacttggcttgctgtcccgttcccatgaacttatcggcaaaacctgcctgggtaaccatttcgattgcagtgttatacagcatttcgcaaggaatgccgggtctggcgatcgaagcgatcttttcctgaatatccagacaaacctgatgagcggtatatgcttcttccgacaatttgccgatagagaacacacggctcatatcgcccatatatccgttgaagttgcctcccagatcgaccataacactttgtccttctttcagcggagtcttgtcagcgcctccgggcagggcaggatcgagtccgcgaccccctaaagcaaaatcgtagggagaaggataaccggcattatctccggtcagcacacttcccatgaagatttccatgctgcggccaaacacgcggaagatgccgaggcaaccttgaagacgcatcagacgttcgatttctatcgagaactcgatatctgtcattccggggtaatatgcgaacggaatctgttcgtatgccttggcatgcgccatgcccgaacgacggaacatttcgatttcgatagctgtcttcacgctgcgtgcctgacggatcagcggtgtcccgttcacgacttcagcgtccgggaacaaacctgccagacgaacatattcggtgtaaggaagttcgtcgccttccagcatcagtttagtgggcaaaggcagacctttttctttcagaatatcgacgatctgttccggcttgcggatggggaacgagtgttcgcctgtgatattgttgggccgcttgaaaaacagcagtgccggtgaatgaagagggagataaagatagccgctgactacacagccataggtgtagatcaaatttgcattacaagtaatgagggcggcatcaatgccctgtgacaccatcagactgcgaatcttgtcgcggcggagttttaattcgggttgtagcattttttattgttattactgtataatgctacaaagataattaattccattgaagaaaataatgttaatctcaaaaaaatagcgctacccgcgtcctgtcacaggaggcgagcagcgcaaaccacaaatacaaatacaactaaacaaagtctcttttaaataacgccttgtcccatcatagcgtgagctactttcatgaatccggcaatattagctcccttcacataattgatatatccgtcgggttctgtgccgtatttcacgcattgtgcatggataccgtgcatgatggcgtggagcttttcgtccacttcagcagcgctccagctcaggtgcatggcgttctgagacatttccagtccggaagtggcaacaccaccggcgttgactgccttacccggagcatacattattttcttttcgataaataagtcgattgcttctggcgtacatcccatgttggaaatttctccaatgcaaagaacgttattttttatgagattttgtgcatcttctccatttaattcgttctgagtagcgcaaggaagtgcaatatctgcttttacttcccacggacgcttgccctctacgaaggttgcacccggatatttttcggcgtaaggagcaacgatgtcattgcccgaagcccgaagttcgagcatataatctatcttttctccgctgatgccgtccggatcgtagatatatccgtccggtccggagatcgtaattactttggcacccaattcggtcgccttggtggcagcgccccaagctacgttaccgaagccggagatagcgactgtcttgcctttgatatctatattttttgcctgcaacatctgataaacgaagtacaaaccgccgaagccggtagcttccggacgaatcagcgaaccaccgaactccagtccttttccggtaaaggttcccgtaaattcgcgggtcagcttcttgtacataccgaacatataacctacttcgcgtccgcctacaccgatatcaccggcaggtacatccatgtccggtcccagatggcgccacaattcaagcataaacgcctgacagaaacgcatgatttcagcatcgctcttgccacggggcgagaagtccgaaccgcctttgccgccacccatcggaagggtagtcagcgcattcttgaatgtctgctcgaagccgaggaatttcaaaatggagaggttgacggaagcatggaaacggataccgcctttgtacggaccgattgcattgttgaactgtacacgataaccgagattggtctgaacttcccctttatcgtctacccaagtgacacggaaagtgaagatacgatcaggttctaccagtctttctatgatcttggccttttcaaattcgggatgctgattgtatatatcttcgatcgaaagaagaacttcttttactgcttgaagatactctaattcaccggggtgctttgcctccaaagaggacatgattttctggatgttcatgatatcatattttaaaaggttattctgataaaatgtaaactgctcacactgcaaatataggaaaatttttcaaatatgattggttttatggtgatattttgattaaataatgataaaatgatagtggtaggtgataggtaataagtaataggtaataagtaataggtaataagtaataagctgcgctgtaaaccgcatggttattacttgttacctattacttattacctattataaactttataaagaagatgatagcaaatgagatttaaaaaattaactttgcagggtaaacgtcaagtagactgtactatgaatcatttcattatggaataaaaaatagaaagagactatgctcagcaagtataaattaaaccagctttacttcaaagatacgcaattcgccaatttgatgacacggcggattttcaatgttctgttgattgccaacccgtatgacgctttcatgctggaagatgacggacgcattgacgaaaaaatatttaatgaatatacatccttgtcacttcgttatcctcctcgtttctcacaggtttctacggaagaggaagcattgacgcagttggagaatatgtcattcgatctggtgatctgtatgccgagtacgggagacaatgacagttttgatatcgggcggcacatcaaagagaaatacgaacatattccgatcgttatcctgactcctttcagtcacggtattacgaagcggattatcaacgaagacctgagcgcatttgaatacgtattctgctggctgggcaataccgacctgttggtttctattatcaaactaatggaagataagatgaacctcgaacatgatgtgcaggaagtaggcgtgcagatgatacttttggtggaagacggcatccggttctattcttccattcttcccaacctgtataaattcgtgttgaagcagagccaggaattttctaccgaagctctgaatgcgcaccagcgcacgcttcgtatgcgtgggcgtcctaaaatcgttttggcgcgtacgtatcaggaagcgatggaaatctatcgcaaataccagaataatatattaggagtcattaccgacgtccgtttcccgaaagtggaacggggcgagaaagacggtctggcaggtatcaagctttgtgccgccatacgcaagaacgatccgttcgtaccgttgattatccaatcctccgaatcggaaaactcttcgtatgccgccaaatacggtgccagctttatcgataagaattctaaaaagatggacgttgacctgcggcgcatcgtttccgataacttcgggttcggtgactttgtgttccgcaatccggagaccggagaagagattgcccgtgtgcggaacctgaaagagctgcagaatatcctgtttgccgtgcctgccgagtccttcttgtatcatatcagccggaatcacgtttcgcgctggctctattcgcgtgccatgtttccggtagccgagtttctgaagccgatcacgtggaccagtcttcaggacgtagatgcacaccgccggattatcttcgaggcgatcgtgaagtaccggaagatgaaaaatcagggagtggttgccgtcttcaaacgtgaccgtttcgaccgttactccaactttgcccgtatcggcgacggttcgctgggaggaaaaggccgtggccttgccttcattgataatatggtgaagcgttatcccgaatttgaagagttcgaaaatgcacgggtggcaattcctaagacagtggtactgtgtaccgatgtcttcgacgagtttatggagaccaataatctttatcaaatcgctctatcggatgccgacgatgatacgattctacgatatttcctaaaggcgaaactgcccgaccggttggtagaggacttcttcaccttcttcgatgtggtgaaatccccgattgccatccgttcatcctctttgttggaagattctcattatcagccgtttgctggaatatacaatacgtatatgattccttatctggacgaccgttacgaaatgctccgtatgctttccgatgcgatcaaaggagtctatgcgtcggtttacttcagagacagtaaagcctatatgcaggctacatcgaacgtgatcgaccaggaaaagatggcagtcatcttgcaggaagttgtgggaaatcaatacggagaccgttactacccgtctatgtccggcgtggcacgttcgctcaattattatcccttgggagatgaaaaagccgaagaaggcacggtgaacctggctcttggattaggaaaatatattgtagacggaggtatgacgcttcgtttctctccttatcacccgaatcaagtgttgcaaaccagtgaaatggaaatagccctgaaagaaacacagacccgtttctacgcattggacttgaaaaacgcagggcatgatttctctatcgacgacggctttaacctgttgaaacttcatgtgaaggaagccgaaagtgacggttcgttacgctatatcgcttctacttacgatccgtatgatcaggtgatccgtgacggtttgtatcccggtggacgcaaggtaatcacgtttgccaatatccttcaacacgatgtattcccgctggcacgcatcctgcaactggttttgaagtacggtgaacaggaaatgcggcgcccggtggagattgagtttgccgcgaccttgagccgtgaacaagataagacgggtacattctacctgttgcaaatccgcccgattgtggacagcaaagaaatgctggacgaagacttgacgctgataccggatgaagacgtggtgctccgttccaataactcattggggcatggcgtcatgaacgaaatttatgatatcgtctacgtcaagacggatggatacagtgcttcgaacaatcaggccattgcctgggaaatagagaaaatgaacctgcaattcctcaatgcaggaaggaattatgtgctcgtaggtccgggacgttggggcagcagtgatacatggctgggcattccggtgaagtggccgcatatctccgccgcccgtgtgatagtggaggccggactgaccaattatcgtgtagacccgagtcagggaactcacttcttccagaacctcacttcgttcggcgtaggctattttacgatcaatgcctttatgaatgacggagtctacaatcaggatttcctcaatgcccaacctgcggtggaagaaacgaaattcctgcgtcatgtccgctttgaaaagccgatggtagtcaagatggatggtaagaagaagctcggcgttgttctgatgccggggattgactgatctctttccggttgataaataaatgaaacaaaaaagttctgctctcattggaaaagcagaacttttttttaaatagtcccgttggttttaaaggaacggggtcttggtttaaaaccaacggcctgtttctttaaaaccaatgggacgttccttttaaaggaataaaaaaggatttttattctgctgatatacatctgtttactgttctgtcgaaaaaaagagcataaatccgtcgggaaatatgctctttctttgacaaatggttggttgttcttttattctttcaatgcttcttgcagatcaatgcccaatgctttggcgactccggcaccgtatgcgggatctgctttgtagcagttgcgggtgtgacgctgtttaatgaataattcggagtctcccatagcacgtgccgtgttttcaaacagaagttgctgttcgtccgccggcatcaagcggaacagatctcccggctggctgtagtaatcatcatcatattcgcgttcattataattgtatatttctccgttgccggatgctttgagaggcggttctttcatgtgaggagagtctttccattctccgtaactgttgggttcgtagcctttggttgcaccgtagttgccgtctacgcgcatagctccgtcacggtggtaagcatggaacgggcaacggggtttattcaccggaatttgttcggcgttcactccgaggcgataacgctgtgcgtcgccgtaagagaacagacgtccctgtaacatcttgtccggtgagaatccgatgccatctacggtattgatcgggttgaaagctgcttgttctacttctgcgaaatagttttccggattacggttcagttcaaggattccgacgtcttgtagcgggaagtctttgtgcggccatactttggtcaggtcgaacgggttgatgcggtaatggtctgcttcctcttccgtcattaactgaatctggaataaccatttcgggtaatctcccttttcgatgctttcaaaaaggtcgcgttgatgagattcgcggtctttggcgatgatcgcttccgcttcctgatctgtcaggtttttgattccctgcaaggtgcgcaggtggaatttcacccagatacgctggttgtccgcattgataaaactataggtgtggcttccgaatccgtgcatatggcgataggagtaaggaatgccgcgagggctcatagtgattgtcacctgatgaagcgcttcgggcagaagtgtccagaagtcccagttgctgttagggctgcgcatgttcgttttcgggtcgcgcttgatggcatgattcaaatccggaaatttaagcggatcacgtaagaaaaagacaggagtgttgtttccgactaaatcccagttgccctcttcggtgtagaatttcatggcaaaaccgcggatatcacgttcggcatctgccgccccacgctctccggctacggtagagaaacggacgaaacattcagtttgctttccgacttcgctgaaaatggctgcacgggtgtacttcgtaatgtcgtgagtgacggtaaatgtaccgaaagctcccgaacctttggcgtgcatacgtctttccggaatcacttcacgatcaaaatgagcaagcttttcaataagccatgggtcttgtaacatgacaggtccgcgttgacctgcggtttgcgaattctgattgtcggcaatgggacgaccgttcgcggcagttagttttttttcttccataaaatagatgttagtcggaggcaaagtttaaataaaccgaagtcttttttattcttctgtccgggtttataatatgtaacaaagatagaccgattttgcttgcttgtcaaactgataatttctatctaaagatagagaataactatgaacaatctttaaaacctccgatattttttatttcaagtacatctttcatccaagtcatgtacttcttttgcctttttcttctacatcatttgccggaatgaagtacttcctgtcactcactcttttacatgtttgcctgcactcttttacttgtttttcatcactgcggtacaacataaaaaaaactcccgtccttcctttcggaaggcgggagcctttatcttaaaaatgactatagctttcttatatcttgctgattatacgataccctgagccatcatagctttggcaaccttcatgaatccggctacgttagcacctttcacatagtttacatatccgtcggcttcagtaccatactgaacgcaggcttcgtggatattcttcatgatgctcttcagcttttcgtctacttcttcagcgctccagctcaacttgatggagttctgagtcatttcaagacctgatactgatacaccacctgcattagctgctttacccggagcgtacagaatcttagcgtcctggaatactttgatagcttccggagtagaaggcatgtttgctccctcagatacagctatacagccatttgctaccaactgacgggcgtggtcgccgttcaattcgttctgagtggcagaaggcagtgcgatatcgcatttttcaccccaaggtttagctccttctacatatttgcaaccatatttctctgcgtattcgcggatacggccacggtagaggttcttcagttccatgatgtaatccaacttttcgcggtcgataccgtccggatcgtagatgtaaccgtcagagtcggagcaagtaactactttaccacccagttcgattactttttcgattgtatattgagctacgttacccgaaccggaaacaagacaagttttgcctttcaggtcagtacctttggttttcagcatttccatcaggaagtagatgttaccgtaaccggtagcttccggacgaatcagtgaaccaccgaattcgcggcctttaccagtgaatgtgccggtaaattcgtgagccagcttcttgtacataccgaacatgaaacctacttcgcggccacctacaccaatatcacctgcaggtacgtcagtttcgggaccgatgtgacgccacagttccagcatgaatgcctgtacgaaacgcattacttcagcgtttgacttaccacgtggagagaagtcggaaccacccttaccaccacccataggcagcgtagtcagtgagtttttgaatgtctgctcaaaggcaaggaatttcaggatggaaaggtttacagatgcgtggaaacggataccgcctttgtacgggccgatagcgttgttgtgctgaacacggtaacccatgtttgtctgaatattacctttgtcgtccatccaagttacacggaactgaaatactctatcaggaatacacaagcgttcgattaagtttgctttgtcaaactccgggtgtttgttgtattcttcttcaatagtagaaagtacttcttctactgcctgatgatactccggttcgttggggaaccgtcttttcagatcgtctaatacctttgctgcattcataatctttttttcttttattggttgattaaatttcgattacctatttcttttatgcggttgcaaaagtaaagataaaaattgaactagcaaacattttataaagaaaaatgcaataaaacatcaaatttgatattttattgcattaaaactcagaaaaaagatatttatttattctttttcatcgacttatagacaggaataaagactaatgctgccgaaatgacaagcattactatcgtcataccgtcaatacgttcggcttttgtgagaactaaatagcaaagcgccagccaaagcaggctgacgcaaactatttgtgattttgataacggccttctcatcggctttcgtttttcttcttcactacgatggcgtcgatcacggctacggctgtgatgttcacgatgtcgcggacagaactttcaaagtcagtgaaatggataggcttgttcagtcccatctggatagggccgatgaattccgtatcggggtccattgcctgcagcagtttgtatcctgcgttggcggagctcaggttcgggaagatcagcgtattcacgtctttacctttcaggcgggtgaacggatacttggcgtcacgcagttcgcggttcatggcaaagttcacctgcatttcaccgtcgatggcgagttccggatattccttctgcatatagttcactgctccgtgcactttgacagggctgccggaggtatcggcgccgaagttggagtacgacaacatcgagatgaccggtgtatggttgaagaaacggactgtcttgtcagccagtttggcgatgtcaatcagagtttccgtatccggatgacggttgatcagcgtatctgccaggaagtaggtacccttctttgaattaagaatgtgcatcgttccgaaatggttgaatccgggctggatgccgattacttctttggcaactttgatggtgttgctgtatctggtgtagagtccggtgataaatgcgtctgcatctccggtttctaccatcatcataccgaagtagttgcgttcgaacatcttgtcgttggcttcttcgtaggtaaagccttcgcgggcacgtttttcggcaaggatgcgtgagtagcgttcgcggcgttccgactcgtccggatggcggagattgacgatttcgatgccttccaggctcaggtcgagttcttcggccagtttgccgattgcttcgtcgtttcctaataagataggatggcagatgccttcggcttttgcttcgacggcggctttcagcatgttgggatggatgccttcggcgaatacgacacgttgtgggttgcggcgggcggtgtcataaagctggcgggtcagtttggattcgtatcccatcagttcgcgcagatgcacgcagtaagcgtcccagtctttgatttccgtgcgtgccactccgctttccatggctgctttggctacggcacaggaaacttcggtgatgaggcgcgggtctaccggtttcgggatgaagtattccggaccgaaagagaggttgttgacgtggtatgctgtgttcactacatcaggtacaggctgttttgccagattggcgatagcatgtactgctgcgattttcatttcttcgttgatcgctttggcctgtgtatcgagtgcgccgcggaagatgtacgggaagccgattacgttgttgatctggttcggatagtcggaacgtccggttgccatcagtacgtcggggcgggcgctcattgcatcttcgtaagagatttccggtgtcgggtttgccagtgcgaatacgatcggcatgggagccatgctgcgcaccatgtcctgactcagtacgttacctttggacaagccgaggaatacatcagcgcctttgatcgcttcttccagtgtgtggatatccgtgcggtcggtggcaaaatatctcttctgttcgttgaggtcggtacgtgtcttgctgataacgcctttgctgtccagcatgacgatattttcgaggcgtgcccccagtgatacatataatttggtacaggatacggcagatgctccggcaccgtttacgacgattttcacatcctctattttctttccggccacttgcagggcatttaccagtccggcgctggagatgatagcggttccgtgctgatcgtcgtgcatcacagggatgtcaagttcttctttcagacggcgttcgatttcgaaacattcgggagctttgatgtcttccagattgataccgccgaaagtaggagcgattgcttttacggcagcgatgaatttctccgggtctttctcgtccacttcgatatcgaacacgtcgattcctgcgtagattttgaaaagcagacctttgccttccatcaccggtttgccgctcagtgcgcctatgtcacccagtccgagtacggctgtaccgttagaaataacagctaccaggttgcctttggctgtgtatttgtaagcgtcctgcggattcttctctatttcgaggcaaggctctgccacgccgggagagtatgcaagtgataaatcagtttgtgtactgtaaggtttggtaggaactacctcgatcttaccgggtttgccctgtgaatggtagagcaaagcggcttctttggttattttagccatggtattggtatttttattaataagttatcatttggctgcaaatgtaggaataaaagttatacattgttgtctttagatgataatttctattaattttatagcaaaatgactgattttgcacaaacttatggttgctatccgggtctctgtactccttaatgtataatggttatttcttttttctgattgctatataacatatctgttttgatattctctaggcgacattccttcatgccgtttgaaatatcttcctaaatacgactggtccgggaaaccgagccggtcggctatatcctgcattgtcagctccgtagactgaagcagtactttgatctctagaatggcgaaatcatcaatgatctttttggcagaatctccggtcacactgcggcagatgcctgtcaggtatttggtcgaaatacaaagctcgttggcgtagaagttaacttcccgttgtgaaatgcagttttcgtgcaccaatgcgacaaacttcttgaagatttcgtcctgccggcttcccccttctatttcctgtttgtcgaagtagcggtagcatttatcgtaaatatccagcatgaaggattggagatgattcttggctatctggttgcggaagcggttctcgcgatcattataaatagcagttgccgcctgtatcaatccgttgattgctccggtatccttatcgggaagcacatagcacggtctttccttcataaagcggaaaaaggtcggttctaaccgcaggcaggcttcccgaaacatatctttgggaaatccgaaaaaggaggctgtgaagtcactgctgctgccattgatacggataatgcttcccggcagcagtaccacctgagtgtttttgacgatttcgtactctttcagatcgatggtgacgtgtgcccatccactgcggcagaaatagatggcacccccttccattttccagaggtgatgcatgataggtgacaaattctcatcgcttccggcaacaaatgattcccggagaacggcaagggtagagtttctctgtatcataactattcttatttagtgggcaaaaataggactttttcactaaatatcgctcatattgttccgaaaatgaacaaaactctaaacactatgaccagttttctgtggtgaaaagagtctacctttgccgcgatcaaaaattttaataggtaacacaatgagtaaaaaggtatgtaaaatgaagcaagggctattgttgctcggttgtctggttgctgctgtaggttgtaagcaagctccacccacacaaatggaaacaggatatgaagtaatgaccgtttctccgaccgaccggatgatttcgagtgcctattcggcgaccatccgcggacgtcaggacatcgatatttatccacaggtaggcggtacgctgacaaaagtcagtgtcaccgaaggacagcgggtgaagagcggacagacgctgttcatcatcgaccaagtgccgtatgaggcagccctgcagacggcagtggcgaatgtagagtcagccaaagcgtctctggcaacggcacagctgacttacgacagcaaagaggaactgtataaggagaatgtagtttccgctttcgatctgagtacggcaaaaaattctcttctggctgccaaagcccaactggcacaggccaaggcacaagaagtgagcgcccgtaataacctttcttatacggtagtgaagagtccggcagacggagtggtaggtacattgccttatcgcgtaggtgcgttggtgagttccagcattcccgaaccgctgaccaccgtttccgacaattcggacatgtacgtctacttctcaatgacggaaaaccagttgctgggattgattcgccagtatggctctaaagacgaggcgctgaaaagtatgcctgccatcgacttgcagctgaacgataaatcggcttatcccgaacagggacagatcgagtctatcagcggagtcattgaccgttcgacgggtactgtcagcctgcgtgccgttttccctaataaggacggactgctgcacagcggcggtgcgggtaacgtagtgattccggtacagaaaacgggagctttggtgattccgcagggagctacgttcgaaatacaggataagagatatgtatataaggtagtagacggcaaagcgcaatctgccttggtgcaggtgacccgtgtgaacggcggccgcgaatttatcgtggatgaaggactggctccgggcgatgtgattgtggcggaaggcgtaggattgcttcgtgaaggtactccgattaaggcaaagactgcccaggcatctacgacaactactgaaaattaaacaaaggaggaatcatccatgaatttaagaacctttattgaacgccccgtattatcggcagtcatctctattacgattgtcgttgtgggtatcatcgggctgttcagtctgcccgtcgaacaatatcccgatattgctccgccgaccattatggtgagtaccacctattatggcgccagtgcggaaactttgcagaagagtgtgattgctcctttggaagaagcgatcaatggtgtggaagacatgacttacatgacttccagcgccaccaatgctggtacagtgagtatcaccgtgtacttcaagcagggaacagacccggacatggcagcggtcaacgtacagaaccgcgtgtcgagagcgacgggacagcttccggcagaagtaacgcaggtcggtgtgactacttccaaacgtcagacaagtatcctgcagatgttctcgctttccagtccggacgatagctacgatgaaaacttcctttccaactatatcagtatcaatctgaaaccggagattctgcgtatctcgggtgtaggcgacctgatgattatgggaggtgaatatagcatgcgtgtatggatgaagccggacgtgatggcccagtacaaactgattccatcggatatcaccggtgtgcttgccgaacagaatatcgaatcggccaccggttcattcggtgaaaactcgaacgaaacctatcagtatacaatgaaatataaaggacgtctgatcactccggaagaatttggagatattgtcattcgttctacggacaatggtgaggtcctgaagttgaaagacatcgccgagatacagttgggacaggatagctatgcttatcacggtggaatggacggtcatccgggcgtttcgtgcatggtgtttcagacggcgggctccaatgcgaccgaagtaaaccagaacattgataaattccttgaagaagcccgtaaagacctcccgaaaggagtggaactgacacagatgatgagctcgaacgacttcctgttcgcttctatccatgaggtggtgaagacgttgatcgaggcgattatcctggtgattctggtggtatatgtgttcttgcaggactttcgttctacgctgattcctttggtgggagtcattgtttcgctcatcggtacgtttgctttcatggcggtggcaggattcagtatcaatctgctcacgctgtttgcgctcgtgctcgtcattggtacggtggtggacgacgccattattgtcgtcgaggcggtgcaggcacgcttcgacgtaggatacaggtcgtcctatatggcaagtatcgatgcaatgaaaggtatcagtaatgctgttatcacctcttcgctggtgtttatggcagtatttattccggtatccttcatgggcggtacttccggtacgttctatacccagtttggtctgacgatggcggttgccgttggtatttccgctattaatgcgttgacgctgagtccggcattatgtgcgttgctgttgaagccttatatcaatgaagacggtacgcagaagaataactttgcggcacgtttccgtaaagcattcaactcggctttcgatattctgatagagaaatacaagaatgtggtactgatctttatcaaacgcagatggctggcatggtcgctgctcgtttgctctgtagtgttgcttgtattcctgatgaacacaacaaagaccagtctggtgccggacgaagaccagggtgtggtattcgtcaatgtaagtacggcggccggtagttcgctgactacgaccgacgaagtgatggaacgcatcgaaaagcgtctgatggatattccgcagattaagcacgtgcagaaagtggccggctacggattgctggcaggacagggaagctcgttcggtatgttgattctgaaattgaagtcgtgggacgaacgtccgaatgatgaggataatgtgcaggcagtcatcggtcaggtgtacggtcgtacggccgatatcaaggatgccagtgtcttcgctatttcgccgggtatgattccgggttacggtatgggtaatgcgctggaactccatatgcaggataagatgggcggtgatatcaacgaattctttaccactacccagcaatatctgggagcattgaaccagcgtccggaaattgcgatggcatattctacgttcgacgtgcgctatccgcagtggacggtagaggtggatgcagccaagtgtaaacgcgcaggcattacaccggatgcggtattgagcacactgtccggttattatggcggtcagtatgtgtccaacttcaaccgtttctctaaagtatacagagtcatgattcaggcagacccgcaattccgtctggacgaaacttcactggacaatgctttcgtacgtatgtcgaacggagagatggctccgctgagccagttcgtaacgttgacacgcagctacggcgcagagtcgctgagccgtttcaatatgtacaattccatcgccgtgaatgcgatgccggcagacggatatagtacgggagatgctatcaaggccgtacaggaaacagccgtacaggctcttcccaagggatatggctatgattacggaggcatcacccgtgaggaaaatcagcaaagcggtacgactatgatcatctttggtatctgcttcctgatgatttatctgattctgagtgcattgtacgagagctttatcattccgttcgccgtgcttctgagtgtgccttgcggattgatgggaagtttcctcttcgcatggatgttcggactggagaataacatttacttgcagacaggtttgattatgttgatcggtctgttggcaaagacagccatcctgttgaccgaatacgctgccgaacgccgtaaggcaggcatgggactgatcgcttctgcggtaagtgcagccaaagcccgtctgcgtccgattctgatgacagcattgacgatgatcttcggtctgttcccattgatgttgtccagtggtgtaggagccaatggtaaccgttcgctgggtacgggtgtagtcggtggtatgacgatcggtacgctggcattacttttcatcgtgcctactttgtttatcgctttccagtggttgcaggaacgcttacgcccggtgcagagcagacctacggaagactggcagatcgaggaagaaatcaaggtgagtgaagaagaaaaatctaaagcaggaaaaaaataattgatgatgaagaaaatattaatcttatccgcagcaacgctcgtgttgagcagttgcggtatctacaataaatacaaacctgtatcggaagtccccgaaggactttatggaagcgaaaccgtcgcttccgccgatacggcgaacttcggtaatctctcgtggagagaggtctttactgactcgtatttgcagaatttgatcgattcggctttggtacggaatacggatatgcagacagcgcatctccgtgtgaaagaagcggaggcttcgttgctgacgtccaagctttcttatctgccctctttgtttctcgcaccggaaggagctgtgagcagcttcgaccgtggcaaagcgacacagacctactcattgccggtgactgcctcgtgggaactggatatcttcggaaaggtgaccacggccaaacgtcgggcaaaagcggcctatgagcagagcaaggagtatgaacaggcggtgaagacacagttggtgtctgccgtggcaaatacttattataccttgctgatgctcgacgctcaatatgagatttccgtgtccaccgaaacggcatggaaagagagcgtgcggacagcccgtgccatgaagaaggccggtatgatgaccgaagccggactggctcagacggaagccacctattataatatatgtacggcagtgctcgacctgaaagaacaaatcaatcagacggagaactcaatggctttgttgctggcggaaacacctcacaagatacaacgcggcaaactggaaaaccagcagttgccggaagacttctccgtagggattcctttgcagatgctttccaaccgtccggatgtacgtagcgcggagttctctttagcgcaggcattctatacgacgaatgctgcccgtgctgctttctatccttccatcacgctgagcgggagtgctggatggacaaacagtgccggtagcatgattatcaatccgggcaaattcgttgcttctgccgtagcttcactgacgcaacctttatttaacaagggagtgaatatcgcccagctgaaaatagcgaaggcacagcaggaagaagcccgcctcagctttgaacagacattgctgaacgcaggtgtggaagtaaacgaggcactggtgcaatatcagacggcccgtgagaaatccgctttctacgataagcagatcacctctttgcagactgctgccagaagcactagtcttttgatggaacatagtaataatactacttatctggaagtactgaccgcacagcagacattgctgaacgccagactttcacaggtagccaatcgctttaccgaaatccagggcgtgattacactgtatcaggctttgggcggaggccggatgtaggaggatagtatgaatcctgaaaaagtacggtgtcagataatcgaatacaccaaacacgagatgtatctgcacggtgctgacggactgaccatggatgacatagctaaggggatgaagatgtcgaagcgtacgctttacaagctgttccccagtaagacttgtctgttccgcatctgtctttctgatttcaccaacgggatcagaagtcgtctgaaacaaagtcagatgcggatggacagttcgtgtatgcaggtgctttttgccacagtgaacgggtatctcacgttattgcattcgttaggaaagactttattgctggatatcgccgcgaacgaagattaccgcgcttccttcaaacgggaagaggccttctggttgcagcagtttatcgacgtactgacgcattgtaaaatctgtggttacctgcttccgggagtcgatccggatcgctttgcggcagatttgcaggaggttatttatcagagttgcctgcaaggtactccgtatgttgttcagcgtgcgctgaaccatactctcttacgaggactttttgaggtggacggcattcggtatattgacgaacacctgaaactggataaattcaatgtttgtgtatgaaaggaagggcgtgtattgctttttaagcaggcacgcctttttatttgtttgaaatgagttattctctgaaattcccgatcatgtgatatattaagttgttttttaaatcttgtcaattaaacccggagataagcagaaaggcagttaaccgttggcaggttagtataaacgcttttattctcatgcccgtgagaacattttctcatcgcattgagaaataattctcaaaggcatgagaactttttctcactgtggtgagaattttttctcaaaggcatgagaatactttgagaatatagcaacttgtattatgctatgtattaattagatagcagtacagcggtatctgtcttataactgctgttttatgactgctcaaaacgtttaatttctaataatgtagttcttcgcttgtttggttaaggcggctggactgtcctttgtctccgtatgaaaacttgacaaatgatcaatctaaagccctttcaccacatcgacagacaaacccgtgcattctgctatcacatcatccgctatacctttctgcttgaaattgcgggctatctctatggtttggttgtgctctttgagcgcggagaacaccagaccggaaagatattcaagtgtactgtacaagcgttcccgattttccttccgctgataatccacactaaaaaatgtggaacgcttacggtgtaatatcaggtaatatgttccggcagtaagaagtcccgctattatatcaattgggatacccgttccttcaaacaaatttttgtattcttctatagccactttgtaatgcttttccctgcttcgtgccatacgtcttgtggtcgaattgtctgcttcgagttcccacactagcaagtgctgcatatcggtattgtcatataagtaatttgccaaagcttttaaggtgcttttcatgatgtcctcgttggctttgtctgtagggtgttcttcatcgaataaatcgtgtagccaataatcagagatgtatgcgtacttatccagcaaccgctcaatattcttatagttattgagtaggacggacatttgtatgtcggctctttgcataatatccgtaaaggtaatttgcgccagacctttttcacttgctaactgccggatggcatcaaacacgtccgcttccagttcggcgcgggtacggcgtgcacgtttattcttcgattgttccatgtttacttctttgttgcatacaaaagtatgaaaaataagtataagtcacttattttcctttataaaacagatttatgaaacggttcggtcaccgaacaaatttatttctatctttgtcttattagtatttagagaatagaaaaacaaagaacactggggaaagcagagtgggtaagggaacggctttctctacgaacgtatcttttgagtattatttaaatcagtagaaaatggggaatttaatttcgtttatgaaggaagtagccgatgggctgcgggaaagtgggaattttgggactgcccatatttacaggagtagcctgagtgcaatccttgcctttcatggaagtgataagcttcctttccggaaagtaagtcaggagtttcttaaaagtttcgaatcgtatctgcgtggcaggaactgtagctggaatacagtttccacttatatgcgtacgttgcgtgcagtgtataaccgtgcggtcgaccgccatcttgcgccttatgtgcctcatcacttccggtatgtttatacaggaacgcgcgcggacaggaaacgtgcgctggataaggaagacatggagcgtctgatgaaggaacttccgaaacagctgtgtcaggacaacaaggaactacagcgtactcgtggtcttttctttttaatgtttttacttcgtgggattccttttgtggatcttgcctatctgaaaaagcatgatatcgatgggaatgtaatgacttaccgccgtcgaaaaaccggcaggttattaacagtgactcttgtgcctgaagccatgaagctgatcaaacggtatatgaataccgatcctgcttctccctatcttttttcgctgatcaccagtggagagggaacggaagctgcttacaaggaatatcagctggcattgcgcaactttaattatcagttaatgattttgaaacaggttttgggactgacatctgaagtaagctcgtacactgcccgtcatacctgggctacgatggcatactattgtgaggtacatcccggtgttatttccgaagcgatggggcattcttccatcaccgtgacggaaacgtatctgaaacctttcaagaataagaaaattgatgaagcgaatgtagcggttatttcttccttaaagaaggtctatagtgtaggtaagttgttgaattagagaactgttactttgtaggtaacgggaagaaaagacgctgcaaatatgggtatattttggaaaacatgcaaacaaaaatgatattttttctgataaactactaaaaaaaggaaacacacagaataaaactgcggattttttgagaagaacacggcttggtctttaatttttgcaaaagatttccctcccctctgccatcgtctgagagcaggggttaaaaatattctttacttattcaatgaatgtagtccgcagacgcctctgtcggggtggaaaagtacgctttcccgttacctacaaagtaacggaaagacagaccaccaagatgagatggattatgaaatgacagcaaacaaattttttatttattaattgtataacatttaatttacttttatgagaaaatggacgtatttggtcgcaaccttgctaatggcgggtacgacagctacattcacgggatgtattgataccgatgaaccggaaggtatcgttgatctgcggggagcaaaatccgaactgattaaagcacaggctgcggtaaagctggtggaagtggaatggcaaaaagcacaagtagcttatcaggaactggtaaacaaatctaaagaattgagcaatcaataccaggagtatgataatcaaatgcatgctttagacgtgaaactaaaagaattggaagtagagcgcgcacaagctgctacagagcaagctaaagctgaagcagaagctaaaattgccgaagctaatagaaacaaagcttactgggaaaataaaatggctgaagaagctgaaatcttcaaagctgctatgctgaactatcagactcagactgcacaggcacaggaagcttatgataatgcaatgaaactgattgaagctggaaaacttctgctttctgatggagaaaaagcaattattgataaagcacagcaaagactttatgttgcttctgctagcctggaacaatactatggtgccttgaaaacagctcaagatgagtatgatgctgctattatggcaaagaaaacaaaaactttgcctcaattggaagctgccctcaaaatagctcagttaactgttgaaagacaagaaaaagtagtaaaggaaaacgaaagattattagctttggctgacgaatttagttctgtaaattgggatgcagaagtgaaagcactggataagaagattcaagacgctacaacagaaaaaagtaaagctgaaaaaaagaaatcagagattgttaatagtgcagagtaccataaagctgcagatgtattaaagttagagaaagatacactaggtactgaaaatgatgctgctggtgctaaaaccgcttggggagcttataaaaaagctagtgctgattctttggatcagtgtgataattttgttcttaagattaaagcatatgagtcagaaccgataaatgctgctcttgtcgagttgttcagcagagcttctagtacacctgtaggatatcaaaatggtatattctcttatgttgcttcaacatacaaacagaaagattataatgatgaccttaagaatattgaagaagctgaagatcctacaaccgtagtattaacttctgcacctcttacaactaaatctcaagttgaagcttggattaagtatatagatgattttggtgtaagtggagaaagtatagctcaacagcaggctcttttgcaaggtaaaaagaaagctgcggataaagctgctgaggcatatcttgtaggctcaaaagaatggcaggtattggttgatgctgtaagttctaacggagcgactttaaaagttgtacctactgataaagatgaagagaataatccatctataaagactgccgttaaatcttacaatgatgcaattactgtacttggaactgcaatcactgcgtataataaagcttatgatgatttgtataaaaaggcacatgataaatcgattacagatgcaaaagatgctaagtatattgaaggattgattcctaatattgcagatcaggaagcttggaacaaatttaatcaagataagcctaatgccactaatgcagaaaaaatagctaagttggaagaaattgtacttcctgctaaagctacagaagctaaaaaagctgcagaggaatatgtgaagactaatcaacaggtgaaagatgctgcaattgctgcaggtgcggctgcttggtctggatcagatgaagagacagaaaataccaaagctattacagatgctaaaaatgcagcaataaaagcatttggtggcatatctacagcattgaataattatgctacattggctcaggattattatggacaggatttgaaagaaaatattgcactggaagatatcagtggtaagggagctttcttaacagatgatgctgaagcagctggtcataagaaaacattaaagactactataagtgatgaaaatttcaccaaactggtagctgttaagtacgatgattcaatagcaaaagcaagcttgaagagattatcaatatctgcatttggtaacacacttggtgtctatgataatatgggtcgtttgacacctgtaacagaaacagaggtacgtgagcatgcagatgctaataatatgactatcaatgctgcatcttatggattattgggtgctaaaattgaaactgcagatgctgtgaaactttgtgaagatttgattgcagctaaagataagttggatgaagttaaaacaatgttgaccgaagtcttgactaacttagaaaaagagattaaggctaatgatgctaagatggatccatttattacagaagctgctaaaatgtgggctgctgtggaaaaagcacaagatgatgtggatgctgcagaagatgctaagaatgcatatactgccgatattgatgctgaaattattagctgtcagagttacgttgatgatttgactcaaattcaaaaggaccttgttgcacaaatcaattctattaccggtggtacagctacaaatcctattacagcagaacaatatgctgatatatggaaaaataatgtagctttagctgaacagactcttgctaattatcaagtagcggttgaagtggcagaagaaagcattgaattatttaaagctggtaaatatacattggcatataatgttgaaaaggctcagcttaagatggataaagctcaagaggcttatgaagttgcactttctatctacaacaaagctcttgctgacgtgaagaccattttggaaactttgactaagtaataaactaatcacgtaaaagtaacaaaatgataaagaaactatgcacattacttttgctgacctgtataacagctgcgccttcattggcgcagcgttacagcagcagtgatgatgcgtcgtttgccccgaagaaaggacagtggcaggtttcggttttacttggtagcggaaagttctttaatgagaacacctcttatctgcttcccaagttcaccaacaccgaaggagtcgtcggacttcccaatggaggaacggataactccggtgacctgaaccgctatctgaatatcggtagtctgaataataatagtctggtcaatatagccggaatcgaaggcaagtattttctgtctgacaactgggacatcaatttccagtttagcatgaacatcagcctgactcccaagaaagactatgtagaaggcgacaacagtgtacccgatatgatcatacccgcgcaaagttatatcaatgcgcagatgactaataactggtatacctctgtcggctccaactattacttcaagactcgcaacgaacgtattcatccatacgtaggaggcgcccttggcttccagatggcacgcattgaaactacagaaccatacaccggtgatacctataaggatagcgatgattcggaagaacttccttctcaggtctataccgcaggaagcaaagccggtcagatgtatggtctgaaagtagctgccgtagcaggtatcgagtatagcattgccaaaggatttattttcgggttcgagatgcatcctttagcttatcgctatgatttgatacaaatttgtccgaaaggatttgataagtacaatgtcagtcaccataacatcaagattttcgaaatgcctgtggtgaaacttggcttcagattctgacgaacaatgattatacaaatgtataaatgaaaagtgaaagccgctctgctggtattggcgggcggcttttctttcttttcaagaagaaataaaagtccgatgaatagatgtataagacttttgccctttttcattggggtattagtattgggagcttgctctcaaataaaaggttacagaattgacggcagtgcgcctctgccggaatttgagggtaaaatggtttacatgaaagatgtttcgacggatgcccctgttgacagcgcaaggataataaatggaaagtttgcttttgcagacacgacaaaaatagaaaatccggtcataaagatactttcgatccatgccagtaaaatgggactggaataccgcttgcctgttgtgattgaaaacggtaccataaaagcgagtattgccgatgtcgtttgtacggaaggaacgatgctgaacgaacggatgcaggattttcttctggctatagatgcatattctgctgcttgtacggataagccggtggaacagataaaatccgatttctcgaaattactaaagagatatatcgagatgaataatgacaatgtaattggtacttatattcagacggcttaccagtcatcactataatacgataaatattctttttcatttctataataaataagatatacgaatacagagataattaaataaacaagagctcaatcataataatccttctcctgatatcttccggattaatgcactacttctttatgaaggggatatccataagacgagaaacaaagatgcgcccttgcgaaagtccggatttttgtattattatgtttctaaggacgttcctgttcccacatttcccctttttccccaggaacgtccttttatttttcaactaggtttgtatttttattgtaaagcacggatacgtacttctatttctttttcgttttttaatccgtccttcacttcattgatattcgtatctccgtaatggtacggatacaaaatatgcggttgaatgattttagcagattgtatagcttgttccggtgtcatcgtatacggttggttgacaggcaggaaggctatatcgatattctttatttgtttcatttccgggatatcttccgtgtctccggcaatgtaaatccgggtgccgcccacagtgaggatatatccgttgtcacgtcccttgggatggaatttatctctaccgggagttgtattataagcaggtactgcttccagtttgatttcgggtgtaatttgcagtatatcaccatttttcatggcttgtcctttgtccagcatcttctggcaattcggattggcaataatttttgtatccggggtttcgatcgcagcaattgctttggtatcgaaatggtcatggtgttcatgtgttatcaggatatagtcagctttcggttgctgtgtaaagtctgcgtaatcagagactggatcaacaaaaaacttttttccagcatattctattaacaagctggcatgcttaaagaaagtgattttcaggcttttcccgttcttggtggtaaacgaatccgtttcgaagttctgcatctttgtggtcagattaattgaatgattgaataaacaggaataagcaaatccgtaagaaaggcacagcgcgagtgctactaataaaatctttttcatatctatacagagtttggttccttacaaagataaacatctatagcgatttatcagttcatgattaaacatattctgttagaaattaactttcttattgagaagtaggatgataggcagtaaataagaaagggatgaagcattggtgaaaagagaaaggcacagaatcaaaatgtcctgtgcctttgctgtttgttatctgatagtaatcagcttttacgcattcaatgcctgctcgatatccgcaatgatatcatccgcattctcgatacctacggacaaacggattaagtcgggacgtacacctgcttccatcagctgctcatccgacaactggcggtgagtatggctggcggggtgaagcacacaactacgggcatcagctacgtgagtcacaatagcgataaattctaatgaatccataaacttgatagagacatcacgtccgcctttcagtccgaaggagatcactccgcaggaaccgttcggcatatatttctgtgccagtgcatagtatttgttatccggcaggccgcaatagttaacccaggccactttctcgttcttagaaagatattctgctactttctgagcgttacggcaatgctgaggcatacgcaggtgcagtgtttcgagtccaagattcagtaagaaagaattttgcgggctttggatactgccgaggtcacgcatcagttgtgcagttgctttggtgatgtaagcacctttgccgaatgcttttgtataggtcagaccatgataagattcgtccggtgtacagagtccggggaatttgtctgcataggcatcccagtcgaagttgccgctgtcgacgatacagcctcctacgcttgttgcgtgtccatccatgtatttggtagtggagtgaacgataatgtctgctccccattcgaaaggacggcagttgataggagtcgggaatgtattgtccacaatcaaaggtactccgtgactgtgtgcgatacgggcaaacttttcgatatccagcacttcgagagaaggattggagattgtttctccgaacagtgcttttgtattaggctggaaagctgccgagatttcttcttcgctggcatccggatgaacgaatgtaacgtcgatgccgagtttcttcatggtgacaccgaacaagttgaatgttcctccgtagatggcggatgaacaaacgaaatgatctcctgcctggcagatattgaaaatggcataaaagttggctgcctggccgctggatgtaagcatagcagctacaccaccttcaagggcggcaatcttggcggcaaccgcgtcattagtcgggttttgcaggcgggtataaaaataaccactgtcttccaaatcgaaaaggcgtgccatttgttcgctggtatcgtatttgaaagttgtactctgatagatgggcagcacacgcggctcaccctttttaggcgtccatccggcctgtacacacagggtttcgggtttgaattgttttgccataatgatatagggttttaagttttattgccaaaaaaagttttaacggggcaaaagtagggaaaataattgtatttttgtcctgtttataagtgaaatgatactgataaggtagtagtcgaatatgaaaaaaagattctatattcttttattaattagttttcttctttcgttggctgatgtgcaggcgcaacaaaaagctactccgaaagcaggtgaggggatttctacttttttgctgcgtcacaaccgtgctccaaagaaatattacgatgattttgtggaactgaataaggcaaagctggggaaagggaatgtgttgaagctgggggtaacgtatactattcctcctgtcaagagatcggcggcggcttctgaaagaacaacttcggggagagatacttctgcaaaaagaaaagttccaacagaggcggctgataaagagacctcagcaagaaaacaaccctcaaaggtttcgaaaataggaaccactcttcatgaacctcttttcggtaagcaactggcgaatgtaaaggtcacttccaaccgactggcaggtgcctgtttctatgtggtcagcgggcacggcggtcctgatccgggggccatcggacgggtagggaagcacgaacttcacgaagacgagtatgcctatgacattgcacttcgtctcgcccggaatctgatgcaggaaggggcggaagtgcatatcattattcaggatgctaaagatggtatccgtaatgacgcttacctctctaacagcaagcgtgagacttgtatgggcgacccgattccattgaatcaggtacagcgtcttcagcagcgttgcaataaaatcaatgctctttatcggaaagaccgtcagaactatacttactgccgcgctatcttcattcatgtagacagccgcagcaaaaaaaagcagacggatgtctttttctatcattccaataagaaagccgaaagcaaacggctggcaaacaatatgaaagatacgttcgaatccaaatatggaaagcatcagccgaaccgcggcttttccggaacggtgagcggacgcaatttatatgtactttcacacactacccccgcttcagtctttgtcgaactggggaatatacagaatacatttgaccagcggagactggtgatggactccaaccgtcaggcccttgccaaatggttgatggaaggctttctgaaagattttaaagggagaaaataaacttcaatctctttttttcgtgaacaaaacgaaaatcgggatgttatatatgtgcaaatcgcctgatggctgcttgtaagtatgcgaatatatatgagtcagtgaatatgcctccccggcataacaggaagattgcatagtagttttgtcgtgttttattttgtgtttgtgttgtgacggtgctgcgatgtgaatcggggtaccgttttttttgttaaaaagccgttttaacttcatttttttcagaactcttgtgaacaaaatccgaattggtgcgttatttattatgcaaatcgcctgataaagcttcttatgggtatgcgaatatagataagtcaagcaaggtatgcctccccggcattacaggtaagattgcatagtagttttgtcgtgttttattttgtgtttgtgttgtgacggtgctgcgatgtgaatcgaggtgccgtttttttattataaccgctttgggggtataaccagggattatccgacataataaaattctgtgattcagtctgccggaaaatgtcttcctttgcaaaaaagaaataatttagtatcacttaaatcaaatcatttatgttcaatgaaaagagaagcagcatgctgcacggtgtcctgttgatagcattattttcttgtgctgcgttttatattggcgagatgtcttttgtaagaagtatttctttcagtccgatgattgtcggtatcattttgggtatgctttatgccaatagtctgcgaaaccaccttccggaaacgtgggtgccgggaatccagttttgctcgaagaagattctgcgtatcggtatcattttatatggtttcagattgacttttcaagatgtcatggctatcgggttgccggctatgctgatcgatgtgattattgtggctgtgactatttgtggcggtatctatttgggtaaattgctgaagatggaccgtggaatcgcattacttacttccatcggaagtggaatctgtggagccgccgccattctgggggctgaatcgaccatcaaggcaaagccatataaaacggctgtatccgtgtctactgtcgtgattttcggtactatttccatgtttctgtatcctttcttgtaccggaacggactttgtgcactgactcccgatcagatgggaatttatacgggggctaccctgcatgaggttgcccatgtagtaggtgctggagatgcgatgggaaacggtatttcggattctgccatcatagtgaaaatgattcgtgtgatgatgttggttcctgtgcttctgattactacctatctggtggcgagagcgcggaaaagacaagtgcagaaaggacagaagtttcagaagattgcagtgccctggtttgcaataggttttatgggtgtcatcgctttcaattcttttgatttgcttcctgcgcagttggtggcaggtattaacacactggatacctttttgctgacaatggctatgacggcactcgggacagaaacaagcatcgataaattcagaaaggccggagccaaacctttcgtactggctcttttactttatgtgtggctggtagtcggcggatatttccttgtgaagtatcttactccttatctgatgtaggagaaatcatctgatgtaagggaaaaacgtctccttgcaaaatacttattatcactttcaccgcaaattgtacaatcttagacggataaataaagtgtcagtcactgagaacttcccattttatctgtatgatagatacaatttgtggcgaaagtgatgcgtttcatccgggcaggctatatttattgcttttctttcgggtagttaggaccgtaaagcatcgtttttttgcggacaaccaattgaccgtctttcacaaattcctctccccgttcactgaggtggcggatcatttctgcacgcattcctgtcagcagctttttatatttcttgtcgttcacagcattatgcagttctttaggatctttggcaaggtcaaacaattgctcttcacctgtatagaagtaccagatatatttaatctttccgtcggtcaaggcacaccaatagttgtcatcactgtagcaagtggcatgttccaggtcgatgtatttgcgccattccgtttctgtgcctttagccagagatagcagagagcgtccgtctatgtctgtgggaacggaggttcccgctatttcgaggaaagttggcagcaggtcacggagttctacgggattatccaccttgccgggaacgacttgcgctttggctggccatttaataatataaggtatgtgcgtagatccttcatacggataagtcttccgccagtggtagtgatctcccatcatatctccatgatcggaaacgaaaatgataagggaattatcatacattcccttgtcttttaaggtctggaggacacgccctatctgttcgtctatgaaagtgatgttggcataataatagcgtttggagtgacgtgcatattcatttccgaagttgccatagggagcatctttggctgctttttcggggtccagttctttggcgtatttcccacaccagtcaccaatgacgggatcgggaacctgcgcatccttatacatgtcgagaaagcgttgaggcgggtcgtacgggctgtggggacgggcaaaggaaactttcaagaataagggctgattgccgttatcataattctgtatcatctgacaagccatttcaccggtccaataagtagggtgcagactttctttcagtttataggtagctgctccgtgatcgttccatccgattccggtttcatccgggttctttcccggtgcctgtatttgaaaccataagcgatagtcactgatgaaattcggatcttcccggcgtccgctttcatccagcagcgttccttcgaaaccgtgtttgattcgttgcggatgccagtgcatttttccgataccgaaggtataatatccggcatctttcagcatctgaggcatttcgtggttgtacttgggggcaactttaccgtatcctaacaagccatgatgccagggagactgtccggtcaatagtccggcacgggcaggggtactgctgggacacgaagaatatccgttcataaacaacgttccttcgcttgccaaagcgtccagatggggggagataacagattcattacccatgcatcccatggcgtcgccacgttgctgatcggtcataattaagataatgtgcggttgtttttgtgcataggccaaagatgagcacaatccggctgtgacggcaaatgtacatttcaggttaatcatattttcagttttttcataatgtaatactgcaaaggtataaagttttatctattttgcgtgaaagcatttctgctttttatatgaaaaaagaaactgtttcagaaacaggtgggggcacctgtactgaaacagtctcttttattatagctaaccgcctataacttataaaggcatatttccatgttttttaggcggattcgtctgcatcttgttctctgtcatttccagtgcctggatcagacgtttgcgggtttgtctcggatagatgatttcgtcgatgaatcccagttcggcagcttggtagggagtggcaaacttttccttgtaggcttccagttctttaccttttgtctctgcatccgctttgcggaacaggatgtttaccgcaccttccgcacccatgactgcgatttccgcactcggataagcgaagttcacatctgcacctgtctgtttggagttcatcacaatatacgcgccgccgtatgccttgcgggtaatgactgtcagtttggggacagtagcttcggcaaatgcataaacgattttagcaccgtggcggatgataccgttgttctcctgcgtatatccgggaagaaatcccggcacatcttcgaaagtaatcaacggaatgttgaaacagtcgcagaaacggatgaaacggcttgccttgtcgctggcgtcaatgtcgagaacaccggcaaggtaggccggctgattggcgacaataccaaccgaacggcctgccagacgtgcaaaaccgatgatgatattctttgcgaagttagtcattacttcgaagaaatagccgttatctactacccgttcgatgatatccttcatgtcgtatggtacattcgggtctgcggggacgatggtgtcgagtacggcatcttcacggttggtttcgtcagtacagttttgctttttcgtttcgtccatattattctgaggcaagaaggaaagcagttcgcgaatgctcatcaacagttcttcttcggtattgcacataaagtgagtgacaccgcttttgctgctgtgtgtcatggcaccgcccagttcttctttgcttacctcttcgtgaatcacagtctttaccacatccggacctgtcacaaacatgtgactcttttctttcaccataaagatgaagtcggtaagggcaggagagtagcaggcgcctcccgcacacggaccaagaatagccgaaatctgaggaatcactccgcttgccattgtgttctgatagaaaatatctgcatagccggaaaggctttcaattccttcctgaatacgtgcgccaccggaatcattcagcgcaattatcggagcaccgttcttcaatgccagttgctgcactttcacaatctttttcgcattcgaagcggacagtgaacctccgtagactgtaaagtcgtaggcataaacaaatacctggcgcccgtcaatctttccgtaaccggatacgatgccgtctcccggaatcttgtttttgtccatgccatagttggtgcagcggtgaaccattaacttgtccagttcaacaaaagtacctttgtcgagcagcatttcgatacgttcgcgggcagtcatctttccgctttcgtgttgcttttcaatcttttccacgcccccaccgagggaagcgatgcggtcacgttcctggaacgtggcgtatgctttatttatttcttccatgatgcaatccgtttttagtattatacaatcggctctaatgttattaatgtctggtcaccggtgatgttgtcgccttcctgaaccagaatttccttgatgcggcaatctgaagtcactttgtagttgctctgcattttcatggcttcgatgacgatgacggtatctcccgtcctcatttcctgccctgccgtaacagggattttcaccacctttcccggcattggggaagtgatgcggtcgttctgttcatcttcgcctttcttgcgcatacgcagatactttgcctggctgtccacgatttcaacattgaaactgctataatgcgtatttaccttatagcttttaccgttttcgcggcgaatcagttgtgcgtttgcgctgcgaccgtccatcagaatattgcaggtgccattttcggccatcacaacatctgcttcaaacggttttccgtcaatggtaagtaccactttattgtcttccttgctgacgagttctatttccgctatgcggtctcctatatgaatttccataattgaatgctgtttttagtttagatacgaagtacacctttgtgcaaaccgaattctttccatttgctgatgggacggttgtccgttgcgtcacctctgttttcttcaagattcatcagataatccatgtaggcagcaatcatggcaatgttttcggcacgttcgctggtgcgcatgatgcattgttgcagatgctcgccgttcttggtgataaaacctgtgtcgtaatggccttccacaaagtccggtgtgtccatgatggcacgcaggtagctgatgttgttctttacacctgtcagtttatactcatggagtacgcggcgcatccgttcgatggcatattcgcggttagtagcccatacgatcagtttgccgatcatcgggtcataatagatcgggatttcatatccttcgtaaacgtaactgtcgatacgaacaccgattccgttcggttctgtaatctgcttgatgattcccgggctcggcatgaagttcatttccgtgtcctcggcacaaatacggcattcgatggcatggccgcgttgttggatatctttctgtttcaattggagcacttgtccgtcggcaactttgatctgctctttcaccaagtccactccgaccacttcttccgtaatcggatgttctacttgcagacgggtgttcatctcgaggaagtaataattgcgatgcttgtcgaccaagaactcaatcgtgcctgcaccgatatagttgaccgctttggctgcggctaccgccttttcacccatatctttacgcagttcgggagttacgaaaaccgatggcgtctcttccacaatcttctggttgcggcgctgtacggaacattcgcgttcgcacaggtgaatcacgtttccgtgtttgtcgcccagaatctgaaattcaatgtgatgaggttcttccacgaacttctccagataaacggtatcgtcgccaaacgaagaaagtgactcgcttttggcagtcgtataagcctcttccacctcttccgcactgtggataaggcgcataccttttccgccgccgcccatagatgctttcagcatcaccggataaccgatcttgttgcagagttctacggcttcttccacacttttcagattctcctgtgtgccgggaacgacagggactcctgcctcgatcattttaatacgggcggatatcttgtcgcccattgcctccatcgtttcggggtccggtccgataaaaataatattttcttcctgacagcgtcgggcgaaagtcgcgttttcggacaggaaaccatatcccggatgaatagcgtctgcatggcattcctttgccacttcgatgattttttctatattcagataactctctttggatgctgccggtcctacgcaataagcttcgtctgcatagagcacgtgcttcgcggtccggtctgcttcggagaaaatagcgatactcgttatctccatctcccggcaggagcgcatcacccttatggcaatttcaccgcgattggctactaagattttttttatcatactttactcaattaagtacatacttatttaatgccttcccatcttcacagacatagtccatccgacagaaacacagtattttcttgatttggggcttaacaaatgatgttctttctcctaacccacgaggcagaagaacgctttacgcgaagtggcaggtcttctgactgactcttgtcttatagtgccttcccgaaataacatcagtggcgataaattagttcattaataagacattgtatagagcttcacagcagcgggactgtacgggatttgcacccgattcccttttaatcgttgtccgttggacacggactccgaaccatttcggggggcaaagataaataaatattgaatactgtgttctgtttttgcacgaaagtttcagttttgtgcaatgaatgctccggcagatttcctctcctttacttttccaatagaactaaatctctgtgtattaatgtttatgtgttaaaccttcccctttttgtattgttaagactcccactaattaataaaaaggagaatcgatatgaaagaaaagaaaatagctcgtgatacgagaaacagagagaaactggcgggtgatgactgggtaatggcagaattttatgcaacgtggtgtcctcactgccagcgtatgcagcctttgattaaagagttcaagaaagagatggaagggatagtcgaggtagtacaggtagacgtagacgaggaaagtgatctcgctaatttttataccattgaatccactcccacattcattcttttcagaaaaggtgaacagctctggagacaatccggtgaactgacgttggaaagattgggaagagcagtcaaggagtttaaatcttgaaaaagtattaataaaaagggatgtttttctatgaaagttttaaatcgtgttataaaacatacttttttatttggataatttgctaataacacagaagtacgtatctttgcactgtgtttttcatagtattagatttaaggttaacaaaggttggagcaaggcgttgctcctttttttatgcccgtaccccggctttctgttcagagcggtctttatttcgccagcctcagttcgtacagacaagcctgtacttcctccggactgcctgtatgttttccctcgtcatccgatagtttgatgcattctctccattcctgattgacattcattttgcattgcgtgagtttcatgacaatgttggaaggggtaaatcctgtatcattcgttagattggtaccaattccgaaggaacagcgaatcttgtccttgcagtattcctgaatttccagtgctttcgtgaagtcgagagcgttgctgaagacggtagttttggtagtggcatcaatgcccagttctttatagcgggctaccagcttatcgataaaatcaaactcattgccggaatcgcagcgcactccgtcgaatagcttggcctgcttgcggctgagattgctcaggaatattcctgaagtataagtgtcggacagcgcaatgcccaaatctccgtcgtatacattcacccagttttcgagcgccatatagttggcgtgcttatatccgaactgtgccccatgaaacatgaaccactcatgcggatgagttcccatcattttcatgccgtacttcatggcaaaatagcaattggaagttccggtacagtatttggccgtatcattcagccgtttgatcaccgtttcctgcacgtcgattgagaatcttctccgcgtgccgaactccgagaagcggagctggtgctgattggacaattccactttctccgacaatttgcagagtatctcgctcatatcgggtacgttgccgaaaaacttgtttttgatttcggatacgatggcgagcagcggtacttcatacagtgtgactttataaagaaaatcgctgacttcaatatgcagccggcccgttgtgtccagatggatatcgatcttgtccggatcaaaacggaaagaagacagccattcccaatagactctcggaagaaaccggcaattgcgtgtcatgtattccagttcctcttccgtaagtctcaaccggctgagtttgttgaattcgcttttgagcgcttccagaaattcttcggtatattcagtttcgtttctgtcgttgaaactgaaagtacccattgcgtaagggaataatttgatataagcgtacgaggtggtaaacttatagaggtctgtatccagtagtgttcttacaatcatatcgtttattctttaatatgtaaaacgttgtaaagttagtatttgttggacaatcctactgattaattggcaataaatccttgtttagtaagttaatcccacttttagggtgatggagtggtgagacagttcttccttgaattcggtatggaaatattcatcggtccgctgtttcagcctttccagttgctgtatttcatagcctaaggcaatattcatttttagtttttgagtgagctttacctgtgctcctacagacggggaaagatagaatccgccattggtttctttggcagccgccaatgagccaccgatgttgcattccagatagggagtaagtttctttggtcgcgtcatgaagaactgtgcattggcatacagcggaataagagctttttcatagatggacagtccgcttcctgcgccgatagtcagtcgttgcccaatgtgatagtgtgctatgatctgccagttgaagggcgtttgagatggttggcccatagaaagtcccgtgccgatataggtcgtataggagaaatgtttgctgtctgtctgcccgtcagcgtgtatgacaataaggaatagcagagtcagagtgaagatgaagtgtttcataaggatatgaggatgaatgttaatagatatatatttgcaagcgttgagtactgattttagggtattttcgctttccatggcggtgatgcttctacaaaataggcgaaaaaacactttttttaggaataagcttctttataaccaatcaattatggctgtaaaccgtaagacgcaaaatacgtatatgattattatacagtatgatacggattactatattctcaatcattctcatggcgatgagaaaaaattctcaccactatgagaaaagtttctcatcgcattgagaaaaagttctcactgcaatgagaattttttctcaaaggcgtgagaattttttctcgttaaagagagaacggatgcttatagtaataacctgctcatggttgcagccttttatttactttgcttattggatatgaatggttatactcttgacgatatgcagcgctgtggtaagtgaagaggtatcggttacgatctctccgttgctgccatcggggctgctgtgtccgattagtttggctgtaaattctttcttgccggacgtcaggtcaacttctgcggcatagaccagagccggttggccgcttccttcttttccgccggtgtagttggcgtccccttctttggcggatttagggaatgcttcattgaaatctgccgaatgattgatttctactttgacgatgaactgcttctgttttcccgtagggaccattttcacttggaagcttccctgcggagtcgctccggtaattccatcgaccagtggagacttctttgtcggaagatataagccgtcctccgattctactcctctctgataacaccagtggggcagcgcctcttttctccggttgccgccggagaactgccaggattgagtagcgattttatgtgtcacatacacagtggagagataatgtcccttcatatcttccgtccagatagcgatttgcggcggattctttttgttgatccccagaaagagaggaaatttgtgcagccatttttctcccttttcgatggagattttgaggtcgttgctgttgtactctaccaaatcctgattgcatccggtactaaataaggcgatcagccatactcccatcattgtcatcttgttcatttgattttgtttatttctgtagccaaaggtctaccaatagattaattcctgtttccagttgttcccaaccgttttcttcctgtattctgagtccgttgtagaccggacagttctcttcaagtaataccagataactgatggctgccgttacaatggaagctacggcggccgtctctttttgcggatgtctggagagccggctcactgcttctaccagtcggatacctttctcttcccgtatctcgcgcagttctctgacgaatttattattcgtcgtcaactcccagcggtaaaggcgtttcagcgtatagcttttccttaattccataatttgccttctgaatacctgtttgataaaagcaccgatatgttccgggtccggcaattcttcgtcgaagttaatccagtagtcattttgctggatataggcagctatcaatccgtccagcgaattgaaatagcggtaaatgagcattttggctactccggctttggctgccacggcattgattcccagtccttcgaaaccgctttcttcgataatgtcatcaacggctttgatcagtgccagttccgttgcctgcctgtttttgatcatctctttttccattgtcttatgatgttgttactacttggtcacaaaagtatgtttcctatcggtaacatcgaggagaaaaagagagtttttatttgttaattagaaaaaaaggctttggagtatactgagaggggggatgaagaagagaataaatggacagtacatctggctttattggcaaggagtaagatactttttgatagccaatcgttcttatgataaaaagcaggatgtactgtccggggtatatttatgataattcaacggtaggattgtgaatggttaagccgccgtctaccacaatcgtctgtccggtgatgtatcgtgcatcgttggaggccaggaatgcaatggtggcggcaacgtcttcgggttctcccaaataaggtgtggcgcattgtcctaaaaatatattgcgtacttcttcgttcagattgtccagtgcggcaggggtaagaaccaatcccggtgctacggcattgcagcggatatttttctttcccatttgggtggcgatatatttggtcagattgatgacacctgctttgctggctccgtagagagtgccattggcgtcggctgtcagcccgcttatagatgctacgtttacgatatttccgcctccgtgagtggtcatgatgggaatgacctgctgagaaagatacatcgtgcagcaaaggttcagatggaatacttcgtcgaagtaatcgatatccagcttttcaatattcagatcacgtttggggtcggttccgcctacgttgtttataagtacgtctatctgaccgtattccttcatggcgaaatcaaccagttctttacagctttggagttcggtggcggagaaatagatgggacgcacgtcggcccctgattgagtgagttcggcggcaagcttgtcggccctttcctgcgaatgatcggcgatgactacttttgctccttcggagacgatgcggcgtgtggttgcttcgccaatgccaccggcagcaccggtgatgacgactactttgttttcaaatcttttcatatatgttgagaatttgatgattaccttcctctaattaacagctaatgaatggatttgttgttgcctgtaaactcttattaataggaatcggcaacagattcgaaaacttttgcatctcattcagttttatgggctaaatatttaagaagactgctaaatgttaacatgaagttgcttatttgttaatgcggttctgattctattaaaccatgttataagatgtcccgttttagccggaaaatttggagatggggcaaaagtccgtatctttgtactgtgtttttcatagtattagatttaaggttaacaaagattggctgtctgggatagatagccttttttttgctcttatgcgaagaaattatttggagtccgggcgtgattcagaataatgaatattgattgtttcgcagacttttcatttcccgttccttcactacatcatcttctgccggatgcccgatctgcaaaggcgaattcctgtcatgtttcttagtgttatattccacactgttgtaattgcctttgatggcgtaacaatagatgcatccgttgaggcaactttcataagtgcctatgtcgatactttcaatgcaattgcagacattccgctgatttttgtcttttttggcaaggagggggtagccggtgattctttcgatcagttctttgtcgatacacagtccggcaaggattcccaaatgtctcagatcaactttggaggtgcaggtatccagttggatggcaggatattcgttgatggtattcctgaaagagacggctatttcttcaatctcctcttttcgcaacggctgtatgttgaactggccgactgcggtgcggatatgctggtaatggtcaataaatcccagcatacacttttcggtatggtctttaagtccataggcaatttgggcaaacgcctccttatggaaagaaacgtcgtactcttcattggtcagtatcgggtcatagcgccagatcactttttcttttcctattttatccgaaaggcgtttgaatatgtctattcgtttgtcgactgacggcagattattttctaatttctctccgtaaggattgagggtgaactgaaagtagtatttgtagtcttgcagatgatccaatttatcaatcatcggggcgggattcttggtccagaacacgatgcaatctaccacagcaggatgtaagctgaccttgctgatcattttaggattaaaaggattgggaactaacacatatccttctttaatccggttgaagaaccattgcgaatagaatgccggaatatctgtccggcggctggcgctaattatcatatttcaaagttacggtaaaattggttgtattgcaataattccgtgatgaaaaataatcaatagcacggataggagggagaatagagtatactgaaaaaggattaatgcgagattcttgaaaaagcggacttagttgctttttcaagaatctctttaagcaggaactgtgaatgaatatgttaaatgttaacacgaaaagtctgaaatgttaatgcgcttccgagagtcttaaaccgtgttatattatcgtccgattcggctctgaaatttgctatttacttgaaaggtggtatatttgtactgtgtttttttcataagtattagatttaaggttaacaaaagattggttgctcgtgatgagtagccattttttgtttttatacgtcgataattgtttattctttaatcatcgttaatagcatcttgaatttttccaccgttgtaagtgtatgtgatacctattgtttgtacataacaaaaatcgttttttattgttatagtacggaaagtaactaataaggagaacattatgaaaaagaaatttttattgtttggagcactggtcggtgctttgctgttgtcttcctgttcggggggaagtaaaaagcagactgtatcctcggaaagtacggaggaattggataatgccagtaaggtgatcaattattatcatatgtcgctcgctgtattgaggcatgtggctaatgcgaaagatataaacgctgtgttggggtacatggaacagacagggaaagtgcctgaagttgaaccgattgcacctccggaaatagctgcccgtgatacagcggaattgttggatccgggagactattttaatcctgaagtccgtcagaatctaaagcagaattatgccggattgtttaatgtgcggacacagttctatgataacttcaataaatttcttgcttataagaagtcgaaagatacagcaaaaacggctcagcttttggatgaaaactataagttgagcgtagaactgtccgagtataagcaagtgatttttgatatcctaagtcctttgaccgaacaagcggagagtgaacttctggctgatgagccgttgaaagatcagataatggcgatgcgcaagatgtcaggcacggtgcagagcataatgaatttgtattcccgcaaacatgcaatggacggagtacggattgatttgaaaatggcggagctggagaaggaactgaaggctgcggaaaaaattccggctgttacaggttatgatgaagaactgaagaattttcagagcttcctctctaccgttaagtcctttatgaatgatatgcagaaggcaagaagtaaaggtgcatattcggacaaagaatatcaggcgatgtcagaagcctatgaatacgggctttctgttatttgaaaaataagaccccttgcctggctattatattatacccaggcgaggcatattttatgttttgtcgttattgataatatctgtcgattcttttaataacatcttattttcaggacttaaaagtaaatcacatataatgggctttttagttttccaaataagtgtcggcatggagttataggataaattattttttataatgcattgtagcagatgtatagtcgttacttgatatttattttttaattcgtttactttaccataagtaagtttcttaaattctttcaaagattgcaagatgctttcttcgaaagcgagatttggaatagtttcgaatatatgattgatatctgtacgcccatctgttaaagtagctccaagacctgtttcttcacaaaaatcaagtaatgccttgaattttttttgtacagattggttggccatttcggtcaacggcttaatttctacaacgaaacctttcccatcatcaaggaagactatagcatcaggggtatattttcctctatcgtatgtgattgtaatgccttgttcgacataataaataacctcatgtgatttttctaaacgtttatagaattttttctcaagcatcgattcgtaaaaaacatttctttgaagtttattactatagaactctccagcttctgattctaaatattttttgtttgggtcatagtttctatgaggagttatttggtggatttcttcaagagtccatgacttcacatgatcaaaccatataattttgtttgtaatagctgtcaattgtgaattttgctttttgggaaagattgtgcttgtttctttgatttctcttttccaggttttgataatggaataatcctgtttaaagtaaagttgagctagatcaaaaagagtttctatgggatattcagacagatggctttcttgaaatttttttaagtagcaagcaaaattgtgtacttcatcaagattgatctggtgattattagtcaatagattatcaatctcaatgatggctgggatatttctttttcttaaaattccgaatttcttgaatacttttacttttaattgacggattctttcacgactaagtcctaattgatctcccaaacttatcatattttgtatttcgtttccttccaaaccatataattcggagaagatgtattgctctctgtcactatataaaggtgtaccatcttttttagtggctagtatgcacagtttaagagcagttatgagacgaagtccttgagcatccatacggttttatgtattgtgtgtattaatagagaacaatattagacaataaaaaagaaaaaagacataaatacttctattctttttatcattttaacagaaggataattctttaggtttgatttaataattaaatgtctcttttttacaatacagattcaaagagactctctacttttgcttccataattaaaaaagtgatatctttgccatatgcagtcatttcagattataaagcccgttcctgtgctatcgccttacatccgccattattggatattgcaggatgatgcagcagttcctgtttccgaacggactttgcccatcggttgtatgcaacttgtttttcataaagggaaacaactcttcctgcagaatgattcaaagttgcagccacagtcttttatttgcggacagtcggtcggattctccgatgtgttgtcgacgggtaggatagagatgattacggttgtttttcaaccttatgcagcgaaagccttgcttcacattcccgttcacttgtttcatgggaaggatgtagcgatggatgaagtggaagatgtcgaactttcagatttggcgaagcaagtcactgatacttctgataatatagtctgtatccgtctgatagagcagttttttcttcgtcgtttatatgctttttccgggtataacctgaagaggatgtctgctgtctttcaggaaatcaatcttcaaccacaaataaatattcctcaattgtcggaggcggcttgtttgagtagcaagcagttcggacgtgtttttgccgattatgtcggtacgactcctaaggaatatcttcgtattgtgcgtatgcaacgtgctttatttctgttgcaacaggatgcgactctgccttttgcacaggtggcctatgagtgtggatattccgaccagtcccacatgatcaaggagttcaaactattttccggctatacgcctgcagaatatctttctgtttgtgctccttattccgattacttctcggaactttgaaaatgtcttttttttcctatcagagctttgtggcatcccttacttttgcagtgtctttgcaaaggctcaatagtaaccataaaaaaagaacgaaatgaaaaagtttattgcattttttgagattcctacagttgattttcaccgggctgtcgatttctatgaaacagtgtttggggtacagcttccggtttttgaatgtgaagaggagaagatggcgtgtttcacggaagaaggtgaaacggttggcgctatttttcatgctcccgattatcttccttcggaaaaaggagtgattatctcttttaattgtgaagacatcgatcagacactggaaaaagtccttcggaaaggtggaaaaatcatgatgcccaagacgaaaatcgaagtagagggcagaggctggtttgccttgtttgcggatagcgagggaaacagggtagggctttacgctgataaataacagataaaagagaggaagattatctgtccggcgtagttgccctctgatgggtaatgatgagcgaaagtagaatgagactgcattttttatggatgcagtctcatttatttttaaatccttcttattctaccggaatataaatctctgtcaacagctcttcgggagcggtttcgcacggattgttcagatagcgttcggcactgggttcatcgcgtagcgtacattccatttcgggcagacattttccatagatagtatcatataccgcttgcagattgtcatacgtacctttatataagaagattgcataacgtcccgcgggaagcgtcttgaatcctacatctcctttgggagctacctgtacgggcatcaccatacatacatcggtgcgcaatttctcggctggtgtcactttggggtcgtcgtgatagatgcagagcgggctgaaatctcccatcggcagcttttgttctttgatgaactgccacagacgtccccatgtccctccgtagtcattcagtttgtagtcaccggacaggcggatataaataacattgcgtgcaggtatactcttaatttcacttttcagttccaggtctggcctgataattgctggtttcataattacaaagtttttattgtttcgatactctaaaggagaaataccataaaactgtctgaacactttcgacaaggaagaaggggatgaatatccgatgcgataggcaattggaatgtccgaatagcgcaataaacgtgcggctgcttctgtccgcgtccggacaataaaggtaccgatcggttcaccgaggaatgctttcataattcggtgaaaataaaaaggagaaaagtttgatatcctggccagcgatttcaaatcaatgtcttctcctaaatgttgattgatatattctaccacaacatttacgcacttttgatactcttctttggttgtttttttctgttgcataacttcttttggtatttcacttcgcaaaggtattggtaaaaaagggaacgaacttgtccgatattgctattattcattttttttaataaaacctgttgattctcttttagttacgctatgaatttatttgatgattttgagtattccagaatggtgctttagtataaaacatgaccgaatatttaactgtttgaacccgattcttttttgaatctttaaataatgtcaatctattaaataaaataagagaatatgttatgaactattattaaaatagctatcttagtttcgaattattaatagagaatagccatggataaaagagtagtagggaacaatgccggcaaggtctggtgtgccctgaaagaaattggtgaaatttcgataccagaattggcgagaagattaaaccttagcgtagagagtacagcattagccgccggttggctggcgagagagaacaaaatttgtatccagcggaaaaatggattaattgctttatctgatgaaagcactttcccttttagctttggataataaagaatgctgttcgtgaacatctttgaagttccattaacttataagtaaagaattgttgatataaagtatcgtaagttaaatctgaacctgaagaactgaatttagaaagagttactctgtgtatagggtaactctttctaatgtataataaacgtataataatgctgttagtatcttcttctttatatgaaaaatatatactttatattagtgcgaaattatgtgcgtgaaaatttaggggatcgtttgtctattcttcagtctctttatcggtcgatactgtggcgctactttttatggcatgaataacggcggaagtaaatcccctgtgctccagttcattcaatcctttaatggcggctccaccgggagtggctgctttttctatttctaacagcgggtgggtgtcgtgatttaaaatcagttctgtagctccttccatgctatatgccgtcattcgcattgcatcttcagcggagatacccaattctatgccggcttgcatggctgcatgaatatattttaatgcgaaagcgattccactggaagttaatgcagaaatgatatccagctgtttctcttctgcgaacaaacactttcctccttcttcaaatgtttgttttatgagttgctggtgttctttgccggctttgcgtgaagttatcagggtcaggctcgaatgttccgtaatggcgatgttgggaactacccggaatataggcatttcggtttccgataaatgtgccaggtgagaaatagatattccggttaccagtgaaaccaggatttgggtgcgtgagaatcgtaacggagataatacttcgtctactatacatggtttgacagccagaataataatgtcggcttccgatatggcatactgattctctgtcattatgcgtatcgcaggaaattgtttgtgcagattttctagcttgtctgtatgaggagtagaaatgataatatctttttcgttgtagagatgtccttttgccagacaggcagcaactgcgctccctatgtttccggctcctataattgtaattttcatgtttttatggatttgtatttattactttgttaatcaggctgaaagtctttcaagaaaacgctgtgacagcgaattgagtaattgcttcttatcagccgtgtgaactgatattgtgaaacaatgatcgctgccaccataagaaatcagtgatatggggatatgcctgattgtttccatgatgttactttccagttgtgtacgttcccaatgaagtgatcctatgatatgtattacggacatattttcgtcaacgaccatttctgtgtatttgtgcagttctctttgaattattcgcagggtatcacgactggccgtcagaatcatggagacagaaacattggatgaggccattgagataacgtttatctgatatttattaatgacttccagtaatttgcccatgagtaaatagccgggcaggacgttcaatgatgtgaagcgtacaaacgtcactgagtcttggataataatggctttaacactgctttccgtatcatgggaagagatgtagagccgttctgtttccaggtcatgggtgtctattaagcggataacgatattggaacgggctgcaagagtgatacagtctgtataaattaagtgtactccactgttaatcaactgttcggcttcggtgtaggtcagagaatgttgttccctggcacagttccggttggtatagatattcgtgagttcggttgacagaatgatttcgtctgcttcgaatatgctggcgagtacggtagcataataatcattacgcttctcattcatgaaatcaatttcgccatatacatttttgcataaggaaagaggagcgatgaaaatgtcagtatcccgattctcattgatatactgtctgatagattcctgaatgtaggggatatccggtttcctttccagattcatctgcataaaagtaccggtatccaatgtacgggcagtcagtccatgctgacgcaggcagcaggcaaacaattctccggataaccggtatatttcggcttttattattttatcaattaataaatcggctttgtcttccaccagtttgtgcatcttttcgatacattcccggatatatttctttatatccgtatttagtggcaaatctgttatgaggtgatctgccagtgtgcagcaatattcttcgattttattgattgttgtatgcgaagcactgtcttcttcgtgaaaccagctgatagaaatatcctgcagccattcttgtagttgcgtcagtgtcggaaccacaactacgtaaggatgttcctttaggatgtaattgattacttgtctgatttcatcctcttctttcattttttcaaatttgcaaactttcattgttatctgataatttattggttactgatcttttcaaaatgatatgccttttttcaaatagagatggtctgttgccatcgatctgctatttgataatcaggtatattgttcagaatcaaattattaattctattattcccgcttctgaagcagtccattactagatgtaatctgctaataccataccatattaggagatgatataaaaatgactatctttgtagcgtgattaatgaactgacagtatatccatctatttatgaaactctgtatatagctacgctcaacgaatagcatcctttctaatcaggctattcagctatccggtaagcaacgacccgcttgccaaagagtttttatatccattttatgaatttacgaaactgtgtactgctatgagtgtagtatgctgtatcgtgctatttttagttgagcaatgaaatatacgtataagcaaatatggctcatcaactttcctgtgatgatgagcattctgatggagcaattaatcaacattaccgatgctgtctttttaggacacgtaggagaaatcgaattgggagcatccgcacttgcgggaatatattatttagcgatttatatgctgggatttggattcagcattggtctgcaggttatgattgcccgaagaaatggggagcagcattacaaagaaacagggcgcaccttctttcagggattatattttctgatggtgatggcaatcatgctttgtctgttgatacagcttgtttctccgtttattctgcaacagctgattacttctgatgaaatttatcaggctgtgatccgttacctggactggcgtagtttcggactgttgttttcgtttcctttcttggctttccgggctttcctggttgggatcacgaatactaaagcactctccggagcagcccttacggcagtctgtatcaatatgcctttcaactatttactgatattcaaactagatatgggcatatccggagcagctatggcgtcctccattgctgagtttggagcgtttctcatactcttgttatatatgtgtaaaacggtagataagaaaaaatatggtctgagtgctgtctatgatggcagattgctgatgaaactactacaactgtccgtatggagtatgcttcatgcttttatcagtgtcgctccctggtttttgttttttgtggctattgaacatttggggaagacagaacttgctatttccaatattacccgaagtgtgtctaccctcttttttgtgatagtcaattctttcgcttctactaccggatcgttagtcagcaatctgatcggggcaggacaggggaaggagctttttcctgtttgtcgcaaagttctcagattaggctatatggtggggcttccattgatactgacagctctttggggcaatcaatggatcatcggattttatacgaataacgattatttagtcaaacttgctttttggccttttatagtcatgttgttgaattatgtgtttgcattgcccggatatgtttatatcaatgctgttacaggaacggggaagacgaggcttgcctttgtttttcaactggctactatcctgatctacctgatttatctgtatctgttgagcgagtgttttcatgcatctttgtgggtgtatatgacggcagaatatctgttcgttattctattgggaatacaatccattctgtacttgaagaggaaatccaaacggaatatgtacttttgtactttcaatgattgatactttctcgaaatgactgaagatataaagaataaacttttgatgtgtgcagaggtgtaccattgtgcaggttttatcgcaagtgatccggtgcagttccctcatcgttatacgctgaaacaagatatagagattagcggactgctgacggcaattatgagttttggcaatcgcaagcagatattgaagaaagcggaagaactgcataagctaatgggaacctcaccttatcaatatgtattatcccgccggtgggaggaagattttccttccggggcaacccatagtttttatcggatgctgtcgtatgctgattttcatggatacttccgtcggttatatacggcctatacgcagttcggaactttggaagatgctttgaaggtatattccggaatacctatggagaagttatgtgcatttcttgaagtttcagccaaaagtcctcaaaagaaactgaatatgtttttacgttggatgattcgtcgggattcagaggttgatttgggtatttgggagagttttgaccgtaaagacctgattgttccgttagatactcatgtctgtagggtagcttattatttcaagttgacggatacggaaactttttctttgaagaatgcccatcggattactgctgcattggctgaagtctttccggatgatccctgcctaggtgattttgctttatttggattaggagtcaacggggagatttgagttgcagaagctctatagaagtatcaatcaaacctctattaagtccgacatataaaacgggttctgtttctgctgattcgtttttattttttgctccagattcgtgtattaagattcaagtcctctacaatagagaccaatgcatgaatcatgctgaaatcgtttttgagctggctaaggtcatccatcggtttccagatgctggcttcaaaatgatttcttgattcgggaatggctatcaggatatttgaatctctgaaactaattgtgatgttcttattgaattctctgtctagtgcaagaagtcgttccatcattgaaggagaaagaaggtagcgtgcttcaatctggtctgtagagtaaacatcgaatgttttctcgaaatccggattttccagttttacccgcgaaccgctggagcttagtttgaaaagactgttccttaagatagtggtatgtccctgaaagtctttctgaaaatcggcaatgaaaaagaaacctttaaagatatctacccaataatgacttgtctgtccttttgaattgacacgtgtttttctttcttcagcatgaacttctgcgcaacagaagtcggtttttcctacccgtccttgtatcaggtcttctgtgtgataacggtcgggagaagtgaacagggcacagtttcggaatgtactttccttgattccctcttcgggtgtgaagacggcattttcacaaaaagattgtaatacttgtgcgattacttcctgtttataataggtggataactcctgcgatttggcatttatacaactgtagtatgccaataaagcaagacctgccgcaatgccgattccaataagtgcggcattggcataaagggaaaatgcaataccaatcacgagaataatccctcctacccatattccggtggaatgtccttgtttttttagttctttgcgtttctgttcaagactttgcagagtagaggaaagactttgtaccaatgtctcaaattgcggactttctgccatattgtatattgtttttttactgattcaacaggttgttcacattcggaacagtgcgttcctgttcggagatggagaatacgcttttgcgtgtgaaaccaaacatgccggccaacagatttgacgggaaagtctgtactgcattattatagtcagtgacgcaagcgttaaaagtccggcgtgccgccgagagctgctcttcagtttcgttaagcgcacgttgtagctgttcgaagttttcagacgctttcagttgcggatagttttctgcaatggcaaaaaagtgtgtacaggcttgtgagaaagcagagtccagattttctttatcctgattagagaaagatgcgtacgacttgttgcgcatttccgtaatctgtgcgaatgtgcttttttcatgttctgcatattctttgactgtagttaccagattaggaatcaagtcgtatctctttttcagcattacgtcgatggctgcgaaagcattttcagtctcatttctttttcgcaccagtgagttgtaaatagcgatgaaaatcactactactacagctataataattagtatagtcataactatatgtctggcatcctcttgccgttttctatatttgtgaattcgaagtagttttattgcgtcaaagataaagaataaaactggaaaatagaacagtatttgggagtaaagaagaatatatagcggaatatttactgaatatatctgacagaaaccgaataaaaaagaatttccgattatcatcataaaaagcggatgtggaatcgacttttacgatgataaccgaaaattcagataaatcatcaggacgcttgtattttgtttgtgtagtcttgccaaccagctgcggttttatatttctctacagattcggcgggaacacgaatgacagtaatgtcatccggaaatccgtaccatatcttttcaaatacttgtgggggtgttatcccttctaccttgacttctttgatacctgtattattgaaagctgaaaaattaatctgtgtcacatttgccggaatggtcagttgagtgacttttctgttaccgcccaataatccttgtcccaatatccggatactttgtggaatttcgaaacgtgttaattggggacatccttccagacagtaagggtgaatcatagcttcgggatcatcattgaaaacagttccgtaggttgccacttccgttaattccggacagtgataaaaggctctttgcgctatgtttgtaacaccattcggtaacttcacggttgtaatgctactttcccggaatgcttccagcccgattgttctgacgttctccggaatctcaatcgttttcagttgagacgtcttgaggaatgcctgtgcaccgatttctgtcagcgtagcaggtaataacacttcttcaatgcctgcatatacaaaggtgcttgcgggaagtttagtgagtttagtccggcttaaatctgcttttttaaggtgatagcaatagtagaatatgttttcctcaagctgttccagagtcgagggaaatataacttcctgaatagttgaattgaagaaagccatatctccgatggatttcagtccctcattgagtatcaccttgtttattttactgccgttgaaagcatttttaggaatggatttcacgctgttggggagtatgatttcatcgtaccctttcagaacttctgtcagaactccgttttccacacggacaggcgccacctgaatagtaaagcttttctgctttccttctattgttatggtcacttcctgtttgtcgacagggacagatgacgagaaaccactgatctgttttggggcaacattcacggaccgttgtttcccatcatcatattcacctgtcactttgagtccagttaagtctatactctctcctaatgcataaatcgtttttgcaggcagttggtctatggaaaaacgttcaagtaaggctcctgtgggttcagatggttgctccgtcggaggcagttccttcttgaattcatcgttttcagtgctgcaactcagtaatgtaagtcctgctatcatttgcaggcaaagtactattaatatattaagtttagtttgtttcattgtgataaaagcttagctagggaattgggttaaacgtatttctattttcactactttaccagcttctacggttctgccggaagaccatatctggtagttatcaggtccgccaccttcttgtaccacgaacgtaaagaaccgttgcgactgtgctgcgaaccattcttcttgtggtaaaataaaggtggctatcccgctttcattggtccgggcaaccgcagtaggtaaggtcagattatctttctcaaaaactttataatctttttcattatacatctttacgggaatacccgttgcaatttttccattctcatcataaacgacaatcactactttagcttctctcacttcttcgtttcctttttcgcacgctatcataaaaagtatgatacctagcagaataacaatctttctcataatcttcatctttttcaattttttcgaatgcaaaggtagcaagaccgtatcatttttgagttatgatacaatcttgtaaatctaacactcatgtttggacagtgttgatattcagatgattattttgattggattctcagatttctaacaccggcctaacacctattcgaaaagtgataaaaacaggtccttgttagttgtttctgctgatttgatacgtgatttaagtcgtgacttacgggcatatacattggctaccgtatctttcatgaacaggcttattacttgtggtgaaaaacctacaaagatatagcagagtaaccggatgtcagcttctttcattgcagggaaatcattctggagtttttgcatggcgttgtcatggcaggtatttacgattagttccagttcttgcagcatttcattgttttctgcaaaatcggtgattatttgtttcacttcgtggaacatggcggcctgttgtgatgcggtattctcacgttcgtagtaagtttttcccaatttgtcgataatgtcaaaacgagaggctatcaatccttttagatgattttcagtattgcgctgtccttccatgcgttcggtcagagttttgtactcggaattagcttcttctgccagtagcagatagcggtcggtacgttcgcgttgcagtcgcaggcgttggcgggtgatgtaataagccactcctatcatcagaaggattacagttgctgctgcgatttcccaggtagtacggtttttcatccggtattcggcaaagtcagtccgttctttaaaatattcgcgctccaccatgcctgcggaaaattgcatgttcgagcgtgtcagcgaatcagtcagatagatataacggtgtatgttatcagttgctttctcaaagttcctggcttgtgcttcaatacgatatgcggtatattgcaggtcggccaggtcacggatatcggttgtctttgtttctgcgagagccaggtagtagcgtgcgctgtctatacgatttttcaggaggttcacatctaccagtgtatggtagccgtacagggtatcctgtcgggcggaaagctcgatgcgttgcagcaagtcatgaggaatttgccgcttgcccgatactacataaagagaggcaaggttcgtgaggctggcttttgccaggtgatcgttcttttgttcgtcggccagatcaagagcggcagcgtagagacgcattgctttctctatgtctttcgaatgaaaagctgcggctgccatatcaagtgttgactccgtttcttcacgtacattatctgactgccggaagttattgcgggcttcacggaagtaatgataagcccggctgtagttcatctgttcataatatacttcaccgatttgcccgtataacagtcctgcataatagggctcattagtgtctttcagtttctcttctattttgagaaaaaggcgcaatgctcccggtttgtctcctgcccgtagtttgattcgtccccaataataaagagtcttacattggtgtcgtaaatctttggaatgatgtttataatggctccaagcctgacggatcagtgaatcatccgttactttaatatggtttttgtctaatgcttccgagtaaagcaaggcatatctggcctgttcggtctgactgccttcccgcctgagctgctttaatattgtcaaggcactgtccggcttgttttgtaacagagcttccgcctcgtcaagccgggaaatatgttctctattataacatcctgtaaaaaagagaattgctgatagtccaagtataattctgcatttcatgctgtgaatgtagtgaaaatctcttggatttgaaataaggagtagtgccttttttcaatgatgactgcattgttacattattttttatcattgtgattccatatgtatcattgtcatattcatagagggcagttctccaatatcatcaaagcggaatgtgctgcttttgcctgttacaatgattcctttgtcattattgtaaaaagactcttctagaaagaaaaaaaattagtctcacggtctcactgtggaatatctagtatgctgacaatcattaatataatgaatgagagatacctttccgaacaggtatctctcattgtttttccatcaaaaccactagttttcggttatctctcattgctatctctcacatcaaagtaagtacataagatgtggtccgctatatctgtttaaaaccagcagttatttgtatgttaagtcactgtatcctagatgttatcttatatatataatagtgttatctaaccgatattttcatcgttccacccgggtgaacaggccctatcacctaggtgaacaggccagttcattattgtgcaatgatctgtttacccgggtggaacgatgaaaatgtcggttagttaacacacaaacttttgtacttccctaataatggttgacttgtttatctctaatagctgctatgtgttgactagaaatattactaaccctggcagctgtttactttattatttattattcctgcctccggtttacttatttttttcttattcctttaaccggttgactcttctctttgaaagaagaaaaaagaaaggaactcaccctttttcctctttctatcccgctagcagggcattcttggtcttttcataagcaaatgtacatatttatttttaagcaagtgctacattcagatacttttctctgtagcttatccatcttttcctgataggtccttgcatttctcctgcctgtaccggggtaagcatatccaagctcatatgaggcctttcgttgttatagaagtgaacggctgttgctacagcttttctgacttcctgtattgaactaaagcgcattccttgcagcaattcattctttataatgccattcacacgctcagctatggcattgtccttgggattgccatcctctgtcatgctgggaagaatcccgttatgtcgtaatatggcaatataatccgcactggcatattgtacgcctcggtcggagtgatggatcaaacccttaatctcctttgcagctatgcgtctgactgccatttccagagcttccactgtgtaacagcttcccagagtatcacctacgcaatacccaatgatctccttcgtataggcgtctgtcaccagagacaggtagcagaacacataactgccgtcaggcaaccatatggtaatgtaagtgatatcactaacccacagctgatcaggatgttctaatagcaatgtcctggttaaatcaggatactgtggcaagtgatgagaggagtctgtcgtacgtggagcccgaaaacgtttgcgtattgtcagcttatacttggacaatatagcacagaaacagtcacgcccaacaaaggcctggctggtgccgaactcattacggtacatcagccaaagtttcatccccccaataccagggtcctttgaacgcacacgtttgacaaactcaagaacaaaacgttcacgggccgaactatccgtactatggtcaacatacttataaaaggcttgctttgttacaccaaacaatttgcaaagagagaccaccgtataggcatgcctccctttacaaagcctttttattgtttggtaccagctttttttcggataggaagattaaacatctcctcggcaacatcaatcatcgtatcgaaggcgtgcgcacgcattttagcatctttaagctctgcacgtaaacgctcattctcaagacgtaaggcagtaattgaggaggattcctccgaggacttgggagacttgtgctttttcatataagcggatatttcaggattagaatcctcaaagatacgaacccaacgccaaaatgtaatacgggcaatccctttttcttgggcaaaacgagaaactgagaaattcgaacgatagaaatcgccaagaagttcaagctgataaggactaaaggtcatgtcactctttttcatcttttattcattttagttgatacttatagtagtcaaccaaatccagggtaagacatttagttgataaacaggttaagccagggtatactatatgcaaagaagcggtaaacgggcaaataaccaccatcttgatgggaattattcgatgaaccgattgggtatcccgctataggtcaatgtgattttatgcatcgcccttgtcaccgccacataaagcatacttttatctatggtggaatgataattctgattatcagcttgtggaacgatcacttcatcaaattccaacccttttgccatgtgtgcggaagtgacaacaatgccttttgtataagctgaacttagacttgacaaaaacgatatgttatctgtatggacttggagtttctgagcaagcgcttttgcctgagtttctgttttacagattattcccaaagatgtatatccggagtttctgaagtccgataccaaattaacaatgcctgtcgtttcttcttctgcattcttgaatggaaaaatttcaggttgttctccatgtcgcataatgggttccagttcattgtttgcctgaattttctgcgccagactggtaatttcaaaagtagagcggtaactcttacatagtttcattacttctccggtggtaaacgctttttgaatcatggcagcagttgaagagccatagggattgacggattgagaagcatctccaagaattgttttccggcagggataaagtttttggatcactttgtattgtatgggagaatagtcctgcatttcatctatcagaagatgtctgatatgagtttgagttttatttccatccaatgcgaggtgcagataagccaggggagccatatctgcatattccagcatacgattctttcgcatcttgaacatttcaggttttccggcccattcgaaaaagtctttatagatctggaggtcgttatttcctgaaaacatattcttaatttcttttctcagcaggtttttctcagcggtagtcactgtaaggttatactggattttcatcatttccagaatgtaatctgccatggtttcaaatcgttggcgtatggggtaacgatggaatcgtttgaactgttcccctacgaattctgcgggaatagtgatatacttggtgagttttacatcagtcactctgaaatagtgattttccatatggaggatgaatttgtcgagtcgggaaacaaattcgaaagaagctttgtattgtatccgttcgataaaatccggagccggcttttccagtagttccgagacttgtccgaagaaattctgaaacttatatttgttgtcaaggacggtggagagaatctgttccatgctggtttccggtacagtcgtttcaccaagttccggaaggacattggatatgtaatcggcaaatactttattaggtgagatgatcagaatgtctttggatgaaatttttcctttttgtgcatagagcaggtaagcaatacggtgtaaggcaatagacgtttttcccgagccggcgactccctgtatgatgagtacgggcgtatcttcgttgcggataatccggttttgttcgcgttggatggtcataacgatgtttttcatcttgtcgtctgcattggaacagagctctttttgcaggatatcatcatgaacagtgacggaactttcaatcatatattccatcttacctttgcgaatgcggtactgacgcttgagtgaaatctctccatgcacttcacctgacggagaagaataagtggcctcacctgactcatagtcataaaacatacccgaaataggtgaccgccaatcatatatcagatttcttttgtttttgaaatcgtagaatgtgtgtatacctatatatacaggaagttttttgccgctgcttccattttccttaaagtcgattcgtccgaagtaaggaatatccaatatattactcaggcgattgcgtttgtctatcacattttcgcctcgtgcaaaatgattcagtatactttcacgcatggaacggatttcatgaggatcgatgtctttattggaccatagataatctttgtattcctgcagagtatctatgtgctctttaacagacttgtctgtgctgtttatcgtatcattgatgatattgagcacctgttgcaaatatgctttttcctgctcttctgtttcgttgaatatcatatataaattcagtttgggtattaaaagttgattgaaagggtggcaaagttagctagatccggtggggtattaaatagttatttataactatatatcaagcctttttcttatttttgcgtgctcatttaatctagaagaaagatggatatcctcgatattgcaagacgaaatcagcagaaagcatgggaaataatagagaaagtcaatgttatcccgatatgggaaagtattggtgcacaggttaatctggttggttctcttcgtatggggttgctgatgaaacaccgggatattgattttcatatatatacgtcttctttaagtttagccgatagtttcagggcgatggcgaagctggcggaaaacacgtcagtgaagaagatagagtgcgtgaatctgctgcatactgttgaggcgtgtgttgaatggcatgcctggtatcaggattcggataatgcactctggcaaattgatatgatacatatccggaaaggttcccgatacgatgggtattttgagaaagtagccgaacgtatttcttccgtcttgacagatgagattaagcggacaattcttcaattgaaaaatgagacacccgaaagtgaaaagattatgggggtagaatattatcaggctgtcatacgggatggagtgcggacttatgccgggtttgaagaatggcgaaaagagcatccggtgggaggagtgctggaatggatgccttaatcagcttaatatccccgtctcatatcctattcggatggcttcaatggaattttgtactcctaatttccgtaatagattctgtcggtgaatattgacggtatgaatgctgacacacagtttgtctgctatttctttacttaacagtcctttttggatcaggcgtaaaatttcagcttcccgtttggtgagaggattgaaggtctgcagtgacggagaaggagagaacatctctccatttttcagattgagtacagtacagtctaccgtttcggcctcttgttgatcaggtgagatatccatattcccaattaccagccatgcttttccatcgatggtctgctccagaacctgatgcctgctgacaacacgcacgtattgttgcctcgcattgagaacacgaaaactgtaaatattagaatagtcatttcgttgttccggaggcaaactgtatataaactgacttaattttatttgtaagatgagcaattgctcgcggtcgtcgggatggatgcgcgattccagataatcaccctgcctttccaatgttgctatcttgtgggcatcatatcccagtaaatctacaaagttcggagaagcataggcatatctgcatttatatacgtctactacaaatgtacagttccggttcatcttcgagaattgatgaagcatggatttattccgttcccacacggcatagtcgatgtcggtaaaggacaaacgttgctttgcccacaattcttcccgtgtgatatctgttagcttgatttcccgcatgtatggaactgtttttttgattgaagtatgacaaaagtagatataatccgtgatattatcaaggaaggagtagagatttgcttattcttattgtttccatacaataatcgtgctaacaaatgataattattgaacatctcttgaaaaataaataataaaaagatagttatctaattaattgtgttatctttgttcccagagtttgagtcacgaatcattattgtgtagttcttctttataatatattattagtaagtagtcctcttctgtaattatcctcctcactccaaattagtatttatttttaataaaattttagatgaacatttacatttcaggtttaagttatggcacaaatgatgctgacttgacaaatttatttgcagagtatggagaagtttcttcagccaaagttatttttgatagagaaaccggcagatccagaggattcgctttcgtagaaatgacgaatgatgcagaaggacaaaaagctattgacgaattgaatggagttgaatatgaccagaaggttatttcagtgagcgttgcacgtcctcgcgctgaaaaaccgtcatacggtggtaaccgtggaggtggttataacaattcaagaagatattaatatcagaataaataaaagcagaagataatgtcttctgcttttatacagactattaccgtttcatgattcaacggaggaatttctgttatacggagaaaacgaaaaatcattttacatttaagttctgctaattctgcctcttttatgcgcaatatcaggagtatataatcctgcactttccattctgacaatagattattaggcttttttgtaatacaatgctcttggaagaaacaggagtgagagtttaataaataatatccaatcaagcgaacagccaatgatgaaggcgactttgaatacttgaatagagtatgttcggagtgtgttgattttgaaatggccaagcacagaataaaatatatgaaatcattttttataggaaatattgaaattaaagtacctgttatacaaggtggaatgggagttgggatatcattgtccggtctggcgtcagcagtagcaaacgaagggggagtgggagttatatcgtgtgcaggtctggggttgctttatcccaaagaaaaaggcacttatacagaaaaatgcatcagtggcctgaaagaagagattcgcaaatcacgcatgaaaacaaaaggtattattggtgtgaatgtcatggttgccttatcgaattatgctgatatggtgcgtactgcgattaatgaaaagattgatgtgatattttccggtgccggacttccacttgatttgccttcctatttgactacggggagtattacgaaattagtacctattgtatcttcttcaagagctgccaaaataatctgtgacaaatggcaaaagaattataactatctgccggatgcgatagtggtagaaggtcccaaagccggagggcatctgggttttaagaaagaacagctgcaagaccagaattatgcgttggatgtattgattcccgaagtagtggcgattgcggccagttataaagaacagaaacatattccggtgattgccgccggtggaatttcgacaggtgaagatattgcgcactttatggaactgggagcttcgggagtgcagatgggaagtattttcgtgacaacccttgaatgtgatgcttcggaaactttcaaagaagtgtatattcactccaaatccgaagatgttcttattattgaaagtcctgtcggaatgccgggacgggctattgacggagaatttattcatagtgtgaataatggtctggaaaagccgaggaaatgctcattccattgcattaagacgtgtgactatacaaaaagtccttattgcattattaaagcgctgtataatgcggccaaaggaaatatgaaaaaaggttatgcttttgccggtagcaacgcctttctcgcagataaaataagcagtgtgaaagaagtgatgaatacactggaacgcgagtttttcttagcgactcacaaactggtttaatatcggagactttgcatattcagtattgaatgtggcatgctctcttactatatataaaattaaccgctgtgctgaaacagcaaaaataacatttatgacatttaaagaattaaatataaccgaacctattttaaaagcaattgaagaaaaaggatatacagtacctactcctattcaggagaaagcgattcctgtagcattggcaaaaaaagacattttaggctgtgcgcagactggaaccggaaagactgcttcatttgcaatacctattatacaacatttgcatctcaataagggagagggcaagcgttcggaaatcaaagctctgattttgactcctacccgcgaactcgcattgcaaatcagtgaatgtattgaagattattcaaagtatacacgtatccgtcacggagtcatcttcggaggcgtgaatcaacgtccgcaagtggatatgctgcataaaggaattgatattctggttgctactccggggcgtctgctcgatttgatgaatcaaggacatatacgattggataatattcagtattttgttctggacgaagcagaccgtatgcttgatatgggctttattcatgatattaaacggatattgccgaagcttccgaaagaaaagcaaacgttgttcttttcggctacgatgcctgatacgattattgctctgactaattccttgttgaagaatccggtgaagatttatgttacaccgaaatcatcaacggtagattctataaagcagttggtttactttgttgagaagaaagaaaagagcctgttgctgatttcaattttgcaaaaatcggaggactggtcggtacttatcttttcgcgtaccaagcataatgctgataagatagttaaaatattgggtaaagccggcattggcagccaggctattcatggaaataagagtcaggcggcacggcagtccgcattgggtaacttcaagtcgggtaagacgcgagtgatggttgctactgatatcgcttcccggggaattgatattaatgaactgccgttggttatcaattatgatcttcctgatgttcccgagacatatgtacaccgaatcgggcgtacgggaagagctggaaatgcaggtatggcacttacattctgctctcaggaagaacgcaaacagattaatgatattcagaaattgacaggcaaaaaactaaatagggctgattttacaatttaaggtcattcccttacattattcattaaaatatagtataaattaaatataagttctatggcaaaatccattacggtaggtaaacgtgaaaatgaaaaaaagagactcgctaaacgagaagaaaaacaaaagaaaaaggatagcaagaagttatccagtaaaagcagcttcgatgatatgattgcttatgtggacgagaatggaatgataacttcgactcctccggctgaaaacatcaaaaaggaagagataaacctggatgagataatcattgcaactccgaagaaagaagacgaggaacccgttatattgagagggagagttgaattctttaatgaggcaagaggctttggttttataaaggaccttgccggagttgataagtactttttccatgttaataatgtcgttggtaatatctcggaaggtaatattgtaacattcgatcttgaacgtggtgtgaaaggaatgaatgcggtcaatatctgtctcgaaaagaaaccggtggagaattaaaacaaaaacgagggtgaattctaagtcctctccaaacaatatcta
